(19) United States
(12) Patent Application Publication
(10) Pub. No.: US 2025/0011760 A1
(43) Pub. Date: Jan. 9, 2025

(54) LIBRARY PREPARATION METHODS AND COMPOSITIONS AND USES THEREFOR

(71) Applicant: LIFE TECHNOLOGIES CORPORATION, Carlsbad, CA (US)

(72) Inventors: Mark Andersen, Carlsbad, CA (US); Sihong Chen, Vista, CA (US); Daniel Mazur, San Diego, CA (US); Xinzhan Peng, San Diego, CA (US); Guobin Luo, Carlsbad, CA (US)

(21) Appl. No.: 18/768,211

(22) Filed: Jul. 10, 2024

Related U.S. Application Data
(62) Division of application No. 17/302,674, filed on May 10, 2021, now Pat. No. 12,065,643.
Application No. 17/302,674 is a continuation of application No. 16/024,175, filed on Jun. 29, 2018, now Pat. No. 11,001,836.
(60) Provisional application No. 62/685,424, filed on Jun. 15, 2018.
(60) Provisional application No. 62/614,362, filed on Jan. 6, 2018.
(60) Provisional application No. 62/527,893, filed on Jun. 30, 2017.

(51) Int. Cl. C12N 15/10; C12Q 1/6806; C12Q 1/6853; C12Q 1/6855; C12Q 1/686; C40B 20/04; C40B 40/06; C40B 50/06

(52) U.S. Cl. CPC C12N 15/1068; C12N 15/1065; C12Q 1/6806; C12Q 1/6853; C12Q 1/6855; C12Q 1/686; C40B 20/04; C40B 40/06; C40B 50/06

(57) ABSTRACT

Provided are methods for preparing a library of target nucleic acid sequences, as well as compositions and uses therefor. Methods comprise contacting a nucleic acid sample with a plurality of adaptors capable of amplification of one or more target nucleic acid sequences under conditions wherein the target nucleic acid(s) undergo a first amplification; digesting the resulting first amplification products; repairing the digested target amplicons; and amplifying the repaired products in a second amplification, thereby producing a library of target nucleic acid sequence. Each of the plurality of adaptor compositions comprise a handle and a targeted nucleic acid sequence and optionally one or more tag sequences. Provided methods may be carried out in a single, addition only workflow reaction, allowing for rapid production of highly multiplexed targeted libraries, optionally including unique tag sequences. Resulting library compositions are useful for a variety of applications, including sequencing applications.

### RELATED APPLICATIONS

[0001] This application is a divisional of U.S. Non-provisional application Ser. No. 17/302,674, filed May 10, 2021, which is a continuation of U.S. Non-provisional application Ser. No. 16/024,175, filed Jun. 29, 2018, now U.S. Pat. No. 11,001,836, which claims priority to and the benefit under 35 USC § 119 (e) of each of U.S. Provisional Application No. 62/527,893 filed Jun. 30, 2017, U.S. Provisional Application No. 62/614,362, filed Jan. 6, 2018, and U.S. Provisional Application No. 62/685,424, filed Jun. 15, 2018. The entire contents of each of the aforementioned applications are herein incorporated by reference in their entirety.

### SEQUENCE LISTING

[0002] This application hereby incorporates by reference the material of the electronic Sequence Listing filed concurrently herewith. The material in the electronic Sequence Listing is submitted as an Extensible Markup Language (.xml) file entitled “TP103456USDIVI_ST26V2.xml” created on Jul. 17, 2024, which has a file size of 3,741,499 bytes, and is herein incorporated by reference in its entirety.

### FIELD OF THE INVENTION

[0003] The present invention relates to methods of preparing a library of target nucleic acid sequences and compositions and uses therefor.

### BRIEF SUMMARY OF THE INVENTION

[0004] Provided are methods for preparing a library of target nucleic acid sequences, as well as compositions and uses therefor. Methods comprise contacting a nucleic acid sample with a plurality of adaptors capable of amplification of one or more target nucleic acid sequences under conditions wherein the target nucleic acid(s) undergo a first amplification; digesting the resulting first amplification products; repairing the digested target amplicons; and amplifying the repaired products in a second amplification, thereby producing a library of target nucleic acid sequence. Each of the plurality of adaptor compositions comprise a handle and a targeted nucleic acid sequence and optionally one or more tag sequences. Provided methods may be carried out in a single, addition only workflow reaction, allowing for rapid production of highly multiplexed targeted libraries, optionally including unique tag sequences. Resulting library compositions are useful for a variety of applications, including sequencing applications.

[0005] One aspect of the invention comprises methods for preparing a library of target nucleic acid sequences. In certain embodiments the methods comprise contacting a nucleic acid sample with a plurality of adaptors wherein each of a pair of adaptors are capable of amplification of one or more target nucleic acid sequences in the sample under conditions wherein the target nucleic acid(s) undergo a first amplification. The methods further comprise digesting the resulting first amplification products to reduce or eliminate any primer dimers resulting in the reaction and preparing partially digested amplicons, thereby preparing resulting gapped, double stranded partially digested amplicons. The methods further comprise repairing the partially digested target amplicons; then amplifying the repaired products in a second amplification using universal primers to thereby produce a library of target nucleic acid sequences. Each of the plurality of adaptors used in the provided methods comprise a 5′ universal handle sequence and a 3′ target nucleic acid sequence and a cleavable moiety. Two or more target specific adaptor pairs are included for use in provided methods, wherein each of the 3′ target specific sequences comprise cleavable moieties. Optionally, one or more tag sequences are included.

[0006] In another aspect of the invention methods for preparing a library of target nucleic acid sequences having unique tag sequences is provided. In certain embodiments the methods comprise contacting a nucleic acid sample with a plurality of adaptors wherein each of a pair of adaptors are capable of amplification of one or more target nucleic acid sequences in the sample under conditions wherein the target nucleic acid(s) undergo a first amplification. The methods further comprise digesting the resulting first amplification products to reduce or eliminate any primer dimers resulting in the reaction and preparing partially digested amplicons, thereby preparing resulting gapped, double stranded partially digested amplicons. The methods further comprise repairing the partially digested target amplicons; then amplifying the repaired products in a second amplification using universal primers to thereby produce a library of target nucleic acid sequences. Each of the plurality of adaptors used in the provided methods comprise a 5′ universal handle sequence, one or more unique tag sequences and a 3′ target nucleic acid sequence and a cleavable moiety. Two or more target specific adaptor pairs are included for use in provided methods, wherein each of the 3′ target specific sequences comprise cleavable moieties, each tag sequence is flanked by cleavable moieties, and each universal handle is without cleavable moieties.

[0007] In a further aspect, compositions are provided. In some embodiments provided are compositions comprising nucleic acid libraries generated by the methods described herein. In other embodiments, compositions comprising a plurality of nucleic acid adaptors are provided, wherein each of the plurality of adaptors comprise a 5′ universal handle sequence, one or more unique tag sequences, and a 3′ target nucleic acid sequence wherein each adaptor comprises a cleavable moiety. In certain embodiments the target nucleic acid sequence of the adaptor includes at least one cleavable moiety, cleavable moieties are included flanking either end of the tag sequence and the universal handle sequence does not include the cleavable moiety. In certain embodiments, compositions include at least two and up to one hundred thousand target specific adaptor pairs.

[0008] Still further, uses of provided compositions and kits comprising provided compositions for analysis of sequences of the nucleic acid libraries are additional aspects of the invention. In some embodiments, analysis of the sequences of the resulting libraries enables detection of low frequency alleles in a sample of interest.

[0009] All publications, patents, and patent applications mentioned in this specification are herein incorporated by reference to the same extent as if each individual publication, patent, or patent application was specifically and individually indicated to be incorporated by reference.

### BRIEF DESCRIPTION OF THE DRAWINGS

[0010] Efficient methods for production of targeted libraries from complex samples is desirable for a variety of nucleic acid analyses. The present invention provides, inter alia, methods of preparing libraries of target nucleic acid sequences, allowing for rapid production of highly multiplexed targeted libraries, optionally including unique tag sequences; and resulting library compositions are useful for a variety of applications, including sequencing applications. Novel features of the invention are set forth with particularity in the appended claims; and a complete understanding of the features and advantages of the present invention will be obtained by reference to the following detailed description that sets forth illustrative embodiments, in which the principles of the invention are utilized, and the accompanying drawings of which:

[0011] FIG. 1 depicts a workflow method of the invention that enables efficient rapid, highly multiplexed library preparation.

[0012] FIG. 2 depicts results from the experimental description in Example 2A.

[0013] FIG. 3 depicts results from the experimental description in Example 2B.

[0014] FIG. 4A-4C depicts results from the experimental description in Example 4.

[0015] FIG. 5 depicts results from the experimental description in Example 5.

[0016] FIG. 6A-6C depicts results from the experimental description in Example 6.

[0017] FIG. 7 depicts an additional aspect of the workflow of the invention that enables addition of adaptor sequences to facilitate bidirectional sequencing

[0018] FIG. 8 depicts an additional aspect of the workflow of the invention that enables sequencing on Illumina platforms

### DESCRIPTION OF THE INVENTION

[0019] Section headings used herein are for organizational purposes only and are not to be construed as limiting the described subject matter in any way. All literature and similar materials cited in this application, including but not limited to, patents, patent applications, articles, books, treatises, and internet web pages are expressly incorporated by reference in their entirety for any purpose. When definitions of terms in incorporated references appear to differ from the definitions provided in the present teachings, the definition provided in the present teachings shall control. It will be appreciated that there is an implied “about” prior to the temperatures, concentrations, times, etc discussed in the present teachings, such that slight and insubstantial deviations are within the scope of the present teachings herein. In this application, the use of the singular includes the plural unless specifically stated otherwise. It is noted that, as used in this specification, singular forms “a,” “an,” and “the,” and any singular use of a word, include plural referents unless expressly and unequivocally limited to one referent. Also, the use of “comprise”, “comprises”, “comprising”, “contain”, “contains”, “containing”, “include”, “includes”, and “including” are not intended to be limiting. It is to be understood that both the general description is exemplary and explanatory only and not restrictive of the invention.

[0020] Unless otherwise defined, scientific and technical terms used in connection with the invention described herein shall have the meanings that are commonly understood by those of ordinary skill in the art. Further, unless otherwise required by context, singular terms shall include pluralities and plural terms shall include the singular. Generally, nomenclatures utilized in connection with, and techniques of, cell and tissue culture, molecular biology, and protein and oligo- or polynucleotide chemistry and hybridization used herein are those well-known and commonly used in the art. Standard techniques are used, for example, for nucleic acid purification and preparation, chemical analysis, recombinant nucleic acid, and oligonucleotide synthesis. Enzymatic reactions and purification techniques are performed according to manufacturer's specifications or as commonly accomplished in the art or as described herein. Techniques and procedures described herein are generally performed according to conventional methods well known in the art and as described in various general and more specific references that are cited and discussed throughout the instant specification. See. e.g., Sambrook et al., Molecular Cloning: A Laboratory Manual (Third ed., Cold Spring Harbor Laboratory Press, Cold Spring Harbor, N.Y. 2000). Unless specifically provided, any nomenclature utilized in connection with, and laboratory procedures and techniques described herein are those well-known and commonly used in the art. As utilized in accordance with embodiments provided herein, the following terms, unless otherwise indicated, shall be understood to have the following meanings:

[0021] As used herein, “amplify”, “amplifying” or “amplification reaction” and their derivatives, refer generally to an action or process whereby at least a portion of a nucleic acid molecule (referred to as a template nucleic acid molecule) is replicated or copied into at least one additional nucleic acid molecule. The additional nucleic acid molecule optionally includes sequence that is substantially identical or substantially complementary to at least some portion of the template nucleic acid molecule. A template target nucleic acid molecule may be single-stranded or double-stranded. The additional resulting replicated nucleic acid molecule may independently be single-stranded or double-stranded. In some embodiments, amplification includes a template-dependent in vitro enzyme-catalyzed reaction for the production of at least one copy of at least some portion of a target nucleic acid molecule or the production of at least one copy of a target nucleic acid sequence that is complementary to at least some portion of a target nucleic acid molecule. Amplification optionally includes linear or exponential replication of a nucleic acid molecule. In some embodiments, such amplification is performed using isothermal conditions; in other embodiments, such amplification can include thermocycling. In some embodiments, the amplification is a multiplex amplification that includes simultaneous amplification of a plurality of target sequences in a single amplification reaction. At least some target sequences can be situated on the same nucleic acid molecule or on different target nucleic acid molecules included in a single amplification reaction. In some embodiments, “amplification” includes amplification of at least some portion of DNA- and/or RNA-based nucleic acids, whether alone, or in combination. An amplification reaction can include single or double-stranded nucleic acid substrates and can further include any amplification processes known to one of ordinary skill in the art. In some embodiments, an amplification reaction includes polymerase chain reaction (PCR). In some embodiments, an amplification reaction includes isothermal amplification.

[0022] As used herein, “amplification conditions” and derivatives (e.g., conditions for amplification, etc.) generally refers to conditions suitable for amplifying one or more nucleic acid sequences. Amplification can be linear or exponential. In some embodiments, amplification conditions include isothermal conditions or alternatively include thermocyling conditions, or a combination of isothermal and thermocycling conditions. In some embodiments, conditions suitable for amplifying one or more target nucleic acid sequences includes polymerase chain reaction (PCR) conditions. Typically, amplification conditions refer to a reaction mixture that is sufficient to amplify nucleic acids such as one or more target sequences, or to amplify an amplified target sequence ligated or attached to one or more adaptors, e.g., an adaptor-attached amplified target sequence. Generally, amplification conditions include a catalyst for amplification or for nucleic acid synthesis, for example a polymerase; a primer that possesses some degree of complementarity to the nucleic acid to be amplified; and nucleotides, such as deoxyribonucleoside triphosphates (dNTPs) to promote extension of a primer once hybridized to a nucleic acid. Amplification conditions can require hybridization or annealing of a primer to a nucleic acid, extension of the primer and a denaturing step in which the extended primer is separated from the nucleic acid sequence undergoing amplification. Typically, though not necessarily, amplification conditions can include thermocycling. In some embodiments, amplification conditions include a plurality of cycles wherein steps of annealing, extending and separating are repeated. Typically, amplification conditions include cations such as Mg or Mn (e.g., MgCl₂, etc) and can also optionally include various modifiers of ionic strength.

[0023] As used herein, “target sequence” “target nucleic acid sequence” or “target sequence of interest” and derivatives, refers generally to any single or double-stranded nucleic acid sequence that can be amplified or synthesized according to the disclosure, including any nucleic acid sequence suspected or expected to be present in a sample. In some embodiments, the target sequence is present in double-stranded form and includes at least a portion of the particular nucleotide sequence to be amplified or synthesized, or its complement, prior to the addition of target-specific primers or appended adaptors. Target sequences can include the nucleic acids to which primers useful in the amplification or synthesis reaction can hybridize prior to extension by a polymerase. In some embodiments, the term refers to a nucleic acid sequence whose sequence identity, ordering or location of nucleotides is determined by one or more of the methods of the disclosure.

[0024] The term “portion” and its variants, as used herein, when used in reference to a given nucleic acid molecule, for example a primer or a template nucleic acid molecule, comprises any number of contiguous nucleotides within the length of the nucleic acid molecule, including the partial or entire length of the nucleic acid molecule.

[0025] As used herein, “contacting” and its derivatives, when used in reference to two or more components, refers generally to any process whereby the approach, proximity, mixture or commingling of the referenced components is promoted or achieved without necessarily requiring physical contact of such components, and includes mixing of solutions containing any one or more of the referenced components with each other. The referenced components may be contacted in any particular order or combination and the particular order of recitation of components is not limiting. For example, “contacting A with B and C” encompasses embodiments where A is first contacted with B then C, as well as embodiments where C is contacted with A then B, as well as embodiments where a mixture of A and C is contacted with B, and the like. Furthermore, such contacting does not necessarily require that the end result of the contacting process be a mixture including all of the referenced components, as long as at some point during the contacting process all of the referenced components are simultaneously present or simultaneously included in the same mixture or solution. For example, “contacting A with B and C” can include embodiments wherein C is first contacted with A to form a first mixture, which first mixture is then contacted with B to form a second mixture, following which C is removed from the second mixture; optionally A can then also be removed, leaving only B. Where one or more of the referenced components to be contacted includes a plurality (e.g., “contacting a target sequence with a plurality of target-specific primers and a polymerase”), then each member of the plurality can be viewed as an individual component of the contacting process, such that the contacting can include contacting of any one or more members of the plurality with any other member of the plurality and/or with any other referenced component (e.g., some but not all of the plurality of target specific primers can be contacted with a target sequence, then a polymerase, and then with other members of the plurality of target-specific primers) in any order or combination.

[0026] As used herein, the term “primer” and its derivatives refer generally to any polynucleotide that can hybridize to a target sequence of interest. In some embodiments, the primer can also serve to prime nucleic acid synthesis. Typically, a primer functions as a substrate onto which nucleotides can be polymerized by a polymerase; in some embodiments, however, a primer can become incorporated into a synthesized nucleic acid strand and provide a site to which another primer can hybridize to prime synthesis of a new strand that is complementary to the synthesized nucleic acid molecule. A primer may be comprised of any combination of nucleotides or analogs thereof, which may be optionally linked to form a linear polymer of any suitable length. In some embodiments, a primer is a single-stranded oligonucleotide or polynucleotide. (For purposes of this disclosure, the terms “polynucleotide” and “oligonucleotide” are used interchangeably herein and do not necessarily indicate any difference in length between the two). In some embodiments, a primer is double-stranded. If double stranded, a primer is first treated to separate its strands before being used to prepare extension products. Preferably, the primer is an oligodeoxyribonucleotide. A primer must be sufficiently long to prime the synthesis of extension products. Lengths of the primers will depend on many factors, including temperature, source of primer and the use of the method. In some embodiments, a primer acts as a point of initiation for amplification or synthesis when exposed to amplification or synthesis conditions; such amplification or synthesis can occur in a template-dependent fashion and optionally results in formation of a primer extension product that is complementary to at least a portion of the target sequence. Exemplary amplification or synthesis conditions can include contacting the primer with a polynucleotide template (e.g., a template including a target sequence), nucleotides and an inducing agent such as a polymerase at a suitable temperature and pH to induce polymerization of nucleotides onto an end of the target-specific primer. If double-stranded, the primer can optionally be treated to separate its strands before being used to prepare primer extension products. In some embodiments, the primer is an oligodeoxyribonucleotide or an oligoribonucleotide. In some embodiments, the primer can include one or more nucleotide analogs. The exact length and/or composition, including sequence, of the target-specific primer can influence many properties, including melting temperature (Tm), GC content, formation of secondary structures, repeat nucleotide motifs, length of predicted primer extension products, extent of coverage across a nucleic acid molecule of interest, number of primers present in a single amplification or synthesis reaction, presence of nucleotide analogs or modified nucleotides within the primers, and the like. In some embodiments, a primer can be paired with a compatible primer within an amplification or synthesis reaction to form a primer pair consisting or a forward primer and a reverse primer. In some embodiments, the forward primer of the primer pair includes a sequence that is substantially complementary to at least a portion of a strand of a nucleic acid molecule, and the reverse primer of the primer of the primer pair includes a sequence that is substantially identical to at least of portion of the strand. In some embodiments, the forward primer and the reverse primer are capable of hybridizing to opposite strands of a nucleic acid duplex. Optionally, the forward primer primes synthesis of a first nucleic acid strand, and the reverse primer primes synthesis of a second nucleic acid strand, wherein the first and second strands are substantially complementary to each other, or can hybridize to form a double-stranded nucleic acid molecule. In some embodiments, one end of an amplification or synthesis product is defined by the forward primer and the other end of the amplification or synthesis product is defined by the reverse primer. In some embodiments, where the amplification or synthesis of lengthy primer extension products is required, such as amplifying an exon, coding region, or gene, several primer pairs can be created than span the desired length to enable sufficient amplification of the region. In some embodiments, a primer can include one or more cleavable groups. In some embodiments, primer lengths are in the range of about 10 to about 60 nucleotides, about 12 to about 50 nucleotides and about 15 to about 40 nucleotides in length. Typically, a primer is capable of hybridizing to a corresponding target sequence and undergoing primer extension when exposed to amplification conditions in the presence of dNTPS and a polymerase. In some instances, the particular nucleotide sequence or a portion of the primer is known at the outset of the amplification reaction or can be determined by one or more of the methods disclosed herein. In some embodiments, the primer includes one or more cleavable groups at one or more locations within the primer.

[0027] As used herein, “target-specific primer” and its derivatives, refers generally to a single stranded or double-stranded polynucleotide, typically an oligonucleotide, that includes at least one sequence that is at least 50% complementary, typically at least 75% complementary or at least 85% complementary, more typically at least 90% complementary, more typically at least 95% complementary, more typically at least 98% or at least 99% complementary, or identical, to at least a portion of a nucleic acid molecule that includes a target sequence. In such instances, the target-specific primer and target sequence are described as “corresponding” to each other. In some embodiments, the target-specific primer is capable of hybridizing to at least a portion of its corresponding target sequence (or to a complement of the target sequence); such hybridization can optionally be performed under standard hybridization conditions or under stringent hybridization conditions. In some embodiments, the target-specific primer is not capable of hybridizing to the target sequence, or to its complement, but is capable of hybridizing to a portion of a nucleic acid strand including the target sequence, or to its complement. In some embodiments, the target-specific primer includes at least one sequence that is at least 75% complementary, typically at least 85% complementary, more typically at least 90% complementary, more typically at least 95% complementary, more typically at least 98% complementary, or more typically at least 99% complementary, to at least a portion of the target sequence itself; in other embodiments, the target-specific primer includes at least one sequence that is at least 75% complementary, typically at least 85% complementary, more typically at least 90% complementary, more typically at least 95% complementary, more typically at least 98% complementary, or more typically at least 99% complementary, to at least a portion of the nucleic acid molecule other than the target sequence. In some embodiments, the target-specific primer is substantially non-complementary to other target sequences present in the sample; optionally, the target-specific primer is substantially non-complementary to other nucleic acid molecules present in the sample. In some embodiments, nucleic acid molecules present in the sample that do not include or correspond to a target sequence (or to a complement of the target sequence) are referred to as “non-specific” sequences or “non-specific nucleic acids”. In some embodiments, the target-specific primer is designed to include a nucleotide sequence that is substantially complementary to at least a portion of its corresponding target sequence. In some embodiments, a target-specific primer is at least 95% complementary, or at least 99% complementary, or identical, across its entire length to at least a portion of a nucleic acid molecule that includes its corresponding target sequence. In some embodiments, a target-specific primer can be at least 90%, at least 95% complementary, at least 98% complementary or at least 99% complementary, or identical, across its entire length to at least a portion of its corresponding target sequence. In some embodiments, a forward target-specific primer and a reverse target-specific primer define a target-specific primer pair that can be used to amplify the target sequence via template-dependent primer extension. Typically, each primer of a target-specific primer pair includes at least one sequence that is substantially complementary to at least a portion of a nucleic acid molecule including a corresponding target sequence but that is less than 50% complementary to at least one other target sequence in the sample. In some embodiments, amplification can be performed using multiple target-specific primer pairs in a single amplification reaction, wherein each primer pair includes a forward target-specific primer and a reverse target-specific primer, each including at least one sequence that substantially complementary or substantially identical to a corresponding target sequence in the sample, and each primer pair having a different corresponding target sequence. In some embodiments, the target-specific primer can be substantially non-complementary at its 3′ end or its 5′ end to any other target-specific primer present in an amplification reaction. In some embodiments, the target-specific primer can include minimal cross hybridization to other target-specific primers in the amplification reaction. In some embodiments, target-specific primers include minimal cross-hybridization to non-specific sequences in the amplification reaction mixture. In some embodiments, the target-specific primers include minimal self-complementarity. In some embodiments, the target-specific primers can include one or more cleavable groups located at the 3′ end. In some embodiments, the target-specific primers can include one or more cleavable groups located near or about a central nucleotide of the target-specific primer. In some embodiments, one of more targets-specific primers includes only non-cleavable nucleotides at the 5′ end of the target-specific primer. In some embodiments, a target specific primer includes minimal nucleotide sequence overlap at the 3′ end or the 5′ end of the primer as compared to one or more different target-specific primers, optionally in the same amplification reaction. In some embodiments 1, 2, 3, 4, 5, 6, 7, 8, 9, 10 or more, target-specific primers in a single reaction mixture include one or more of the above embodiments. In some embodiments, substantially all of the plurality of target-specific primers in a single reaction mixture includes one or more of the above embodiments.

[0028] As used herein, the term “adaptor” denotes a nucleic acid molecule that can be used for manipulation of a polynucleotide of interest. In some embodiments, adaptors are used for amplification of one or more target nucleic acids. In some embodiments, the adaptors are used in reactions for sequencing. In some embodiments, an adaptor has one or more ends that lack a 5′ phosphate residue. In some embodiments, an adaptor comprises, consists of, or consist essentially of at least one priming site. Such priming site containing adaptors can be referred to as “primer” adaptors. In some embodiments, the adaptor priming site can be useful in PCR processes. In some embodiments an adaptor includes a nucleic acid sequence that is substantially complementary to the 3′ end or the 5′ end of at least one target sequences within the sample, referred to herein as a gene specific target sequence, a target specific sequence, or target specific primer. In some embodiments, the adaptor includes nucleic acid sequence that is substantially non-complementary to the 3′ end or the 5′ end of any target sequence present in the sample. In some embodiments, the adaptor includes single stranded or double-stranded linear oligonucleotide that is not substantially complementary to an target nucleic acid sequence. In some embodiments, the adaptor includes nucleic acid sequence that is substantially non-complementary to at least one, and preferably some or all of the nucleic acid molecules of the sample. In some embodiments, suitable adaptor lengths are in the range of about 10-75 nucleotides, about 12-50 nucleotides and about 15-40 nucleotides in length. Generally, an adaptor can include any combination of nucleotides and/or nucleic acids. In some aspects, adaptors include one or more cleavable groups at one or more locations. In some embodiments, the adaptor includes sequence that is substantially identical, or substantially complementary, to at least a portion of a primer, for example a universal primer. In some embodiments, adaptors include a tag sequence to assist with cataloguing, identification or sequencing. In some embodiments, an adaptor acts as a substrate for amplification of a target sequence, particularly in the presence of a polymerase and dNTPs under suitable temperature and pH.

[0029] As used herein, “polymerase” and its derivatives, generally refers to any enzyme that can catalyze the polymerization of nucleotides (including analogs thereof) into a nucleic acid strand. Typically but not necessarily, such nucleotide polymerization can occur in a template-dependent fashion. Such polymerases can include without limitation naturally occurring polymerases and any subunits and truncations thereof, mutant polymerases, variant polymerases, recombinant, fusion or otherwise engineered polymerases, chemically modified polymerases, synthetic molecules or assemblies, and any analogs, derivatives or fragments thereof that retain the ability to catalyze such polymerization. Optionally, the polymerase can be a mutant polymerase comprising one or more mutations involving the replacement of one or more amino acids with other amino acids, the insertion or deletion of one or more amino acids from the polymerase, or the linkage of parts of two or more polymerases. Typically, the polymerase comprises one or more active sites at which nucleotide binding and/or catalysis of nucleotide polymerization can occur. Some exemplary polymerases include without limitation DNA polymerases and RNA polymerases. The term “polymerase” and its variants, as used herein, also refers to fusion proteins comprising at least two portions linked to each other, where the first portion comprises a peptide that can catalyze the polymerization of nucleotides into a nucleic acid strand and is linked to a second portion that comprises a second polypeptide. In some embodiments, the second polypeptide can include a reporter enzyme or a processivity-enhancing domain. Optionally, the polymerase can possess 5′ exonuclease activity or terminal transferase activity. In some embodiments, the polymerase can be optionally reactivated, for example through the use of heat, chemicals or re-addition of new amounts of polymerase into a reaction mixture. In some embodiments, the polymerase can include a hot-start polymerase and/or an aptamer based polymerase that optionally can be reactivated.

[0030] The terms “identity” and “identical” and their variants, as used herein, when used in reference to two or more nucleic acid sequences, refer to similarity in sequence of the two or more sequences (e.g., nucleotide or polypeptide sequences). In the context of two or more homologous sequences, the percent identity or homology of the sequences or subsequences thereof indicates the percentage of all monomeric units (e.g., nucleotides or amino acids) that are the same (i.e., about 70% identity, preferably 75%, 80%, 85%, 90%, 95%, 98% or 99% identity). The percent identity can be over a specified region, when compared and aligned for maximum correspondence over a comparison window, or designated region as measured using a BLAST or BLAST 2.0 sequence comparison algorithms with default parameters described below, or by manual alignment and visual inspection. Sequences are said to be “substantially identical” when there is at least 85% identity at the amino acid level or at the nucleotide level. Preferably, the identity exists over a region that is at least about 25, 50, or 100 residues in length, or across the entire length of at least one compared sequence. A typical algorithm for determining percent sequence identity and sequence similarity are the BLAST and BLAST 2.0 algorithms, which are described in Altschul et al, Nuc. Acids Res. 25:3389-3402 (1977). Other methods include the algorithms of Smith & Waterman, Adv. Appl. Math. 2:482 (1981), and Needleman & Wunsch, J. Mol. Biol. 48:443 (1970), etc. Another indication that two nucleic acid sequences are substantially identical is that the two molecules or their complements hybridize to each other under stringent hybridization conditions.

[0031] The terms “complementary” and “complement” and their variants, as used herein, refer to any two or more nucleic acid sequences (e.g., portions or entireties of template nucleic acid molecules, target sequences and/or primers) that can undergo cumulative base pairing at two or more individual corresponding positions in antiparallel orientation, as in a hybridized duplex. Such base pairing can proceed according to any set of established rules, for example according to Watson-Crick base pairing rules or according to some other base pairing paradigm. Optionally there can be “complete” or “total” complementarity between a first and second nucleic acid sequence where each nucleotide in the first nucleic acid sequence can undergo a stabilizing base pairing interaction with a nucleotide in the corresponding antiparallel position on the second nucleic acid sequence. “Partial” complementarity describes nucleic acid sequences in which at least 20%, but less than 100%, of the residues of one nucleic acid sequence are complementary to residues in the other nucleic acid sequence. In some embodiments, at least 50%, but less than 100%, of the residues of one nucleic acid sequence are complementary to residues in the other nucleic acid sequence. In some embodiments, at least 70%, 80%, 90%, 95% or 98%, but less than 100%, of the residues of one nucleic acid sequence are complementary to residues in the other nucleic acid sequence. Sequences are said to be “substantially complementary” when at least 85% of the residues of one nucleic acid sequence are complementary to residues in the other nucleic acid sequence. In some embodiments, two complementary or substantially complementary sequences are capable of hybridizing to each other under standard or stringent hybridization conditions. “Non-complementary” describes nucleic acid sequences in which less than 20% of the residues of one nucleic acid sequence are complementary to residues in the other nucleic acid sequence. Sequences are said to be “substantially non-complementary” when less than 15% of the residues of one nucleic acid sequence are complementary to residues in the other nucleic acid sequence. In some embodiments, two non-complementary or substantially non-complementary sequences cannot hybridize to each other under standard or stringent hybridization conditions. A “mismatch” is present at any position in the two opposed nucleotides are not complementary. Complementary nucleotides include nucleotides that are efficiently incorporated by DNA polymerases opposite each other during DNA replication under physiological conditions. In a typical embodiment, complementary nucleotides can form base pairs with each other, such as the A-T/U and G-C base pairs formed through specific Watson-Crick type hydrogen bonding, or base pairs formed through some other type of base pairing paradigm, between the nucleobases of nucleotides and/or polynucleotides in positions antiparallel to each other. The complementarity of other artificial base pairs can be based on other types of hydrogen bonding and/or hydrophobicity of bases and/or shape complementarity between bases.

[0032] As used herein, “amplified target sequences” and its derivatives, refers generally to a nucleic acid sequence produced by the amplification of/amplifying the target sequences using target-specific primers and the methods provided herein. The amplified target sequences may be either of the same sense (the positive strand produced in the second round and subsequent even-numbered rounds of amplification) or antisense (i.e., the negative strand produced during the first and subsequent odd-numbered rounds of amplification) with respect to the target sequences. For the purposes of this disclosure, amplified target sequences are typically less than 50% complementary to any portion of another amplified target sequence in the reaction.

[0033] As used herein, terms “ligating”, “ligation” and derivatives refer generally to the act or process for covalently linking two or more molecules together, for example, covalently linking two or more nucleic acid molecules to each other. In some embodiments, ligation includes joining nicks between adjacent nucleotides of nucleic acids. In some embodiments, ligation includes forming a covalent bond between an end of a first and an end of a second nucleic acid molecule. In some embodiments, for example embodiments wherein the nucleic acid molecules to be ligated include conventional nucleotide residues, the ligation can include forming a covalent bond between a 5′ phosphate group of one nucleic acid and a 3′ hydroxyl group of a second nucleic acid thereby forming a ligated nucleic acid molecule. In some embodiments, any means for joining nicks or bonding a 5′ phosphate to a 3′ hydroxyl between adjacent nucleotides can be employed. In an exemplary embodiment, an enzyme such as a ligase can be used.

[0034] As used herein, “ligase” and its derivatives, refers generally to any agent capable of catalyzing the ligation of two substrate molecules. In some embodiments, the ligase includes an enzyme capable of catalyzing the joining of nicks between adjacent nucleotides of a nucleic acid. In some embodiments, a ligase includes an enzyme capable of catalyzing the formation of a covalent bond between a 5′ phosphate of one nucleic acid molecule to a 3′ hydroxyl of another nucleic acid molecule thereby forming a ligated nucleic acid molecule. Suitable ligases may include, but not limited to, T4 DNA ligase; T7 DNA ligase; Taq DNA ligase, and E. coli DNA ligase.

[0035] As defined herein, a “cleavable group” generally refers to any moiety that once incorporated into a nucleic acid can be cleaved under appropriate conditions. For example, a cleavable group can be incorporated into a target-specific primer, an amplified sequence, an adaptor or a nucleic acid molecule of the sample. In an exemplary embodiment, a target-specific primer can include a cleavable group that becomes incorporated into the amplified product and is subsequently cleaved after amplification, thereby removing a portion, or all, of the target-specific primer from the amplified product. The cleavable group can be cleaved or otherwise removed from a target-specific primer, an amplified sequence, an adaptor or a nucleic acid molecule of the sample by any acceptable means. For example, a cleavable group can be removed from a target-specific primer, an amplified sequence, an adaptor or a nucleic acid molecule of the sample by enzymatic, thermal, photo-oxidative or chemical treatment. In one aspect, a cleavable group can include a nucleobase that is not naturally occurring. For example, an oligodeoxyribonucleotide can include one or more RNA nucleobases, such as uracil that can be removed by a uracil glycosylase. In some embodiments, a cleavable group can include one or more modified nucleobases (such as 7-methylguanine, 8-oxo-guanine, xanthine, hypoxanthine, 5,6-dihydrouracil or 5-methylcytosine) or one or more modified nucleosides (i.e., 7-methylguanosine, 8-oxo-deoxyguanosine, xanthosine, inosine, dihydrouridine or 5-methylcytidine). The modified nucleobases or nucleotides can be removed from the nucleic acid by enzymatic, chemical or thermal means. In one embodiment, a cleavable group can include a moiety that can be removed from a primer after amplification (or synthesis) upon exposure to ultraviolet light (i.e., bromodeoxyuridine). In another embodiment, a cleavable group can include methylated cytosine. Typically, methylated cytosine can be cleaved from a primer for example, after induction of amplification (or synthesis), upon sodium bisulfite treatment. In some embodiments, a cleavable moiety can include a restriction site. For example, a primer or target sequence can include a nucleic acid sequence that is specific to one or more restriction enzymes, and following amplification (or synthesis), the primer or target sequence can be treated with the one or more restriction enzymes such that the cleavable group is removed. Typically, one or more cleavable groups can be included at one or more locations with a target-specific primer, an amplified sequence, an adaptor or a nucleic acid molecule of the sample.

[0036] As used herein, “digestion”, “digestion step” and its derivatives, generally refers to any process by which a cleavable group is cleaved or otherwise removed from a target-specific primer, an amplified sequence, an adaptor or a nucleic acid molecule of the sample. In some embodiments, the digestion step involves a chemical, thermal, photo-oxidative or digestive process.

[0037] As used herein, the term “hybridization” is consistent with its use in the art, and generally refers to the process whereby two nucleic acid molecules undergo base pairing interactions. Two nucleic acid molecule molecules are said to be hybridized when any portion of one nucleic acid molecule is base paired with any portion of the other nucleic acid molecule; it is not necessarily required that the two nucleic acid molecules be hybridized across their entire respective lengths and in some embodiments, at least one of the nucleic acid molecules can include portions that are not hybridized to the other nucleic acid molecule. The phrase “hybridizing under stringent conditions” and its variants refers generally to conditions under which hybridization of a target-specific primer to a target sequence occurs in the presence of high hybridization temperature and low ionic strength. As used herein, the phrase “standard hybridization conditions” and its variants refers generally to conditions under which hybridization of a primer to an oligonucleotide (i.e., a target sequence), occurs in the presence of low hybridization temperature and high ionic strength. In one exemplary embodiment, standard hybridization conditions include an aqueous environment containing about 100 mm magnesium sulfate, about 500 mM Tris-sulfate at pH 8.9, and about 200 mM ammonium sulfate at about 50-55° C., or equivalents thereof.

[0038] As used herein, the term “end” and its variants, when used in reference to a nucleic acid molecule, for example a target sequence or amplified target sequence, can include the terminal 30 nucleotides, the terminal 20 and even more typically the terminal 15 nucleotides of the nucleic acid molecule. A linear nucleic acid molecule comprised of linked series of contiguous nucleotides typically includes at least two ends. In some embodiments, one end of the nucleic acid molecule can include a 3′ hydroxyl group or its equivalent, and can be referred to as the “3′ end” and its derivatives. Optionally, the 3′ end includes a 3′ hydroxyl group that is not linked to a 5′ phosphate group of a mononucleotide pentose ring. Typically, the 3′ end includes one or more 5′ linked nucleotides located adjacent to the nucleotide including the unlinked 3′ hydroxyl group, typically the 30 nucleotides located adjacent to the 3′ hydroxyl, typically the terminal 20 and even more typically the terminal 15 nucleotides. Generally, the one or more linked nucleotides can be represented as a percentage of the nucleotides present in the oligonucleotide or can be provided as a number of linked nucleotides adjacent to the unlinked 3′ hydroxyl. For example, the 3′ end can include less than 50% of the nucleotide length of the oligonucleotide. In some embodiments, the 3′ end does not include any unlinked 3′ hydroxyl group but can include any moiety capable of serving as a site for attachment of nucleotides via primer extension and/or nucleotide polymerization. In some embodiments, the term “3′ end” for example when referring to a target-specific primer, can include the terminal 10 nucleotides, the terminal 5 nucleotides, the terminal 4, 3, 2 or fewer nucleotides at the 3′ end. In some embodiments, the term “3′ end” when referring to a target-specific primer can include nucleotides located at nucleotide positions 10 or fewer from the 3′ terminus. As used herein, “5′ end”, and its derivatives, generally refers to an end of a nucleic acid molecule, for example a target sequence or amplified target sequence, which includes a free 5′ phosphate group or its equivalent. In some embodiments, the 5′ end includes a 5′ phosphate group that is not linked to a 3′ hydroxyl of a neighboring mononucleotide pentose ring. Typically, the 5′ end includes to one or more linked nucleotides located adjacent to the 5′ phosphate, typically the 30 nucleotides located adjacent to the nucleotide including the 5′ phosphate group, typically the terminal 20 and even more typically the terminal 15 nucleotides. Generally, the one or more linked nucleotides can be represented as a percentage of the nucleotides present in the oligonucleotide or can be provided as a number of linked nucleotides adjacent to the 5′ phosphate. For example, the 5′ end can be less than 50% of the nucleotide length of an oligonucleotide. In another exemplary embodiment, the 5′ end can include about 15 nucleotides adjacent to the nucleotide including the terminal 5′ phosphate. In some embodiments, the 5′ end does not include any unlinked 5′ phosphate group but can include any moiety capable of serving as a site of attachment to a 3′ hydroxyl group, or to the 3′ end of another nucleic acid molecule. In some embodiments, the term “5′ end” for example when referring to a target-specific primer, can include the terminal 10 nucleotides, the terminal 5 nucleotides, the terminal 4, 3, 2 or fewer nucleotides at the 5′ end. In some embodiments, the term “5′ end” when referring to a target-specific primer can include nucleotides located at positions 10 or fewer from the 5′ terminus. In some embodiments, the 5′ end of a target-specific primer can include only non-cleavable nucleotides, for example nucleotides that do not contain one or more cleavable groups as disclosed herein, or a cleavable nucleotide as would be readily determined by one of ordinary skill in the art. A “first end” and a “second end” of a polynucleotide refer to the 5′ end or the 3′ end of the polynucleotide. Either the first end or second end of a polynucleotide can be the 5′ end or the 3′ end of the polynucleotide; the terms “first” and “second” are not meant to denote that the end is specifically the 5′ end or the 3′ end.

[0039] As used herein “tag,” “barcode,” “unique tag” or “tag sequence” and its derivatives, refers generally to a unique short (6-14 nucleotide) nucleic acid sequence within an adaptor or primer that can act as a ‘key’ to distinguish or separate a plurality of amplified target sequences in a sample. For the purposes of this disclosure, a barcode or unique tag sequence is incorporated into the nucleotide sequence of an adaptor or primer. As used herein, “barcode sequence” denotes a nucleic acid fixed sequence that is sufficient to allow for the identification of a sample or source of nucleic acid sequences of interest. A barcode sequence can be, but need not be, a small section of the original nucleic acid sequence on which the identification is to be based. In some embodiments a barcode is 5-20 nucleic acids long. In some embodiments, the barcode is comprised of analog nucleotides, such as L-DNA, LNA, PNA, etc. As used herein, “unique tag sequence” denotes a nucleic acid sequence having at least one random sequence and at least one fixed sequence. A unique tag sequence, alone or in conjunction with a second unique tag sequence, is sufficient to allow for the identification of a single target nucleic acid molecule in a sample. A unique tag sequence can, but need not, comprise a small section of the original target nucleic acid sequence. In some embodiments a unique tag sequence is 2-50 nucleotides or base-pairs, or 2-25 nucleotides or base-pairs, or 2-10 nucleotides or base-pairs in length. A unique tag sequence can comprise at least one random sequence interspersed with a fixed sequence.

[0040] As used herein, “comparable maximal minimum melting temperatures” and its derivatives, refers generally to the melting temperature (Tm) of each nucleic acid fragment for a single adaptor or target-specific primer after digestion of a cleavable groups. The hybridization temperature of each nucleic acid fragment generated by an adaptor or target-specific primer is compared to determine the maximal minimum temperature required preventing hybridization of a nucleic acid sequence from the target-specific primer or adaptor or fragment or portion thereof to a respective target sequence. Once the maximal hybridization temperature is known, it is possible to manipulate the adaptor or target-specific primer, for example by moving the location of one or more cleavable group(s) along the length of the primer, to achieve a comparable maximal minimum melting temperature with respect to each nucleic acid fragment to thereby optimize digestion and repair steps of library preparation.

[0041] As used herein, “addition only” and its derivatives, refers generally to a series of steps in which reagents and components are added to a first or single reaction mixture. Typically, the series of steps excludes the removal of the reaction mixture from a first vessel to a second vessel in order to complete the series of steps. Generally, an addition only process excludes the manipulation of the reaction mixture outside the vessel containing the reaction mixture. Typically, an addition-only process is amenable to automation and high-throughput.

[0042] As used herein, “polymerizing conditions” and its derivatives, refers generally to conditions suitable for nucleotide polymerization. In typical embodiments, such nucleotide polymerization is catalyzed by a polymerase. In some embodiments, polymerizing conditions include conditions for primer extension, optionally in a template-dependent manner, resulting in the generation of a synthesized nucleic acid sequence. In some embodiments, the polymerizing conditions include polymerase chain reaction (PCR). Typically, the polymerizing conditions include use of a reaction mixture that is sufficient to synthesize nucleic acids and includes a polymerase and nucleotides. The polymerizing conditions can include conditions for annealing of a target-specific primer to a target sequence and extension of the primer in a template dependent manner in the presence of a polymerase. In some embodiments, polymerizing conditions can be practiced using thermocycling. Additionally, polymerizing conditions can include a plurality of cycles where the steps of annealing, extending, and separating the two nucleic strands are repeated. Typically, the polymerizing conditions include a cation such as MgCl₂. Generally, polymerization of one or more nucleotides to form a nucleic acid strand includes that the nucleotides be linked to each other via phosphodiester bonds, however, alternative linkages may be possible in the context of particular nucleotide analogs.

[0043] As used herein, the term “nucleic acid” refers to natural nucleic acids, artificial nucleic acids, analogs thereof, or combinations thereof, including polynucleotides and oligonucleotides. As used herein, the terms “polynucleotide” and “oligonucleotide” are used interchangeably and mean single-stranded and double-stranded polymers of nucleotides including, but not limited to, 2′-deoxyribonucleotides (nucleic acid) and ribonucleotides (RNA) linked by internucleotide phosphodiester bond linkages, e.g. 3′-5′ and 2′-5′, inverted linkages, e.g. 3′-3′ and 5′-5′, branched structures, or analog nucleic acids. Polynucleotides have associated counter ions, such as H⁺, NH₄⁺, trialkylammonium, Mg²⁺, Na⁺ and the like. An oligonucleotide can be composed entirely of deoxyribonucleotides, entirely of ribonucleotides, or chimeric mixtures thereof. Oligonucleotides can be comprised of nucleobase and sugar analogs. Polynucleotides typically range in size from a few monomeric units, e.g. 5-40, when they are more commonly frequently referred to in the art as oligonucleotides, to several thousands of monomeric nucleotide units, when they are more commonly referred to in the art as polynucleotides; for purposes of this disclosure, however, both oligonucleotides and polynucleotides may be of any suitable length. Unless denoted otherwise, whenever a oligonucleotide sequence is represented, it will be understood that the nucleotides are in 5′ to 3′ order from left to right and that “A” denotes deoxyadenosine, “C” denotes deoxycytidine, “G” denotes deoxyguanosine, “T” denotes thymidine, and “U’ denotes deoxyuridine. As discussed herein and known in the art, oligonucleotides and polynucleotides are said to have “5′ ends” and “3′ ends” because mononucleotides are typically reacted to form oligonucleotides via attachment of the 5′ phosphate or equivalent group of one nucleotide to the 3′ hydroxyl or equivalent group of its neighboring nucleotide, optionally via a phosphodiester or other suitable linkage.

[0044] As used herein, the term “polymerase chain reaction” (“PCR”) refers to the method of K. B. Mullis U.S. Pat. Nos. 4,683,195 and 4,683,202, hereby incorporated by reference, which describe a method for increasing the concentration of a segment of a polynucleotide of interest in a mixture of genomic DNA without cloning or purification. This process for amplifying the polynucleotide of interest consists of introducing a large excess of two oligonucleotide primers to the DNA mixture containing the desired polynucleotide of interest, followed by a precise sequence of thermal cycling in the presence of a DNA polymerase. The two primers are complementary to their respective strands of the double stranded polynucleotide of interest. To effect amplification, the mixture is denatured and the primers then annealed to their complementary sequences within the polynucleotide of interest molecule. Following annealing, the primers are extended with a polymerase to form a new pair of complementary strands. The steps of denaturation, primer annealing and polymerase extension can be repeated many times (i.e., denaturation, annealing and extension constitute one “cycle”; there can be numerous “cycles”) to obtain a high concentration of an amplified segment of the desired polynucleotide of interest. The length of the amplified segment of the desired polynucleotide of interest (amplicon) is determined by the relative positions of the primers with respect to each other, and therefore, this length is a controllable parameter. By virtue of repeating the process, the method is referred to as the “polymerase chain reaction” (hereinafter “PCR”). Because the desired amplified segments of the polynucleotide of interest become the predominant nucleic acid sequences (in terms of concentration) in the mixture, they are said to be “PCR amplified”. As defined herein, target nucleic acid molecules within a sample including a plurality of target nucleic acid molecules are amplified via PCR. In a modification to the method discussed above, the target nucleic acid molecules can be PCR amplified using a plurality of different primer pairs, in some cases, one or more primer pairs per target nucleic acid molecule of interest, thereby forming a multiplex PCR reaction. Using multiplex PCR, it is possible to simultaneously amplify multiple nucleic acid molecules of interest from a sample to form amplified target sequences. It is also possible to detect the amplified target sequences by several different methodologies (e.g., quantitation with a bioanalyzer or qPCR, hybridization with a labeled probe; incorporation of biotinylated primers followed by avidin-enzyme conjugate detection; incorporation of ³²P-labeled deoxynucleotide triphosphates, such as dCTP or dATP, into the amplified target sequence). Any oligonucleotide sequence can be amplified with the appropriate set of primers, thereby allowing for the amplification of target nucleic acid molecules from genomic DNA, cDNA, formalin-fixed paraffin-embedded DNA, fine-needle biopsies and various other sources. In particular, the amplified target sequences created by the multiplex PCR process as disclosed herein, are themselves efficient substrates for subsequent PCR amplification or various downstream assays or manipulations.

[0045] As defined herein “multiplex amplification” refers to selective and non-random amplification of two or more target sequences within a sample using at least one target-specific primer. In some embodiments, multiplex amplification is performed such that some or all of the target sequences are amplified within a single reaction vessel. The “plexy” or “plex” of a given multiplex amplification refers generally to the number of different target-specific sequences that are amplified during that single multiplex amplification. In some embodiments, the plexy can be about 12-plex, 24-plex, 48-plex, 96-plex, 192-plex, 384-plex, 768-plex, 1536-plex, 3072-plex, 6144-plex or higher.

### Methods of Preparing Nucleic Acid Libraries

[0046] Provided methods of the invention comprise efficient procedures which enable rapid preparation of highly multiplexed libraries suitable for downstream analysis. See FIG. 1. The methods optionally allow for incorporation of one or more unique tag sequences, if so desired. Certain methods comprise streamlined, addition-only procedures conveying highly rapid library generation.

[0047] In one aspect of the invention, methods for preparing a library of target nucleic acid sequences are provided. In some embodiments, methods comprise contacting a nucleic acid sample with a plurality of adaptors capable of amplification of one or more target nucleic acid sequences in the sample under conditions wherein the target nucleic acid(s) undergo a first amplification; digesting resulting first amplification products to reduce or eliminate resulting primer dimers and prepare partially digested target amplicons, thereby producing gapped, double stranded amplicons. The methods further comprise repairing the partially digested target amplicons; then amplifying the repaired target amplicons in a second amplification using universal primers, thereby producing a library of target nucleic acid sequences. Each of the plurality of adaptors used in the methods herein comprise a universal handle sequence and a target nucleic acid sequence and a cleavable moiety and optionally one or more tag sequences. At least two and up to one hundred thousand target specific adaptor pairs are included in the provided methods, wherein the target nucleic acid sequence of each adaptor includes at least one cleavable moiety and the universal handle sequence does not include the cleavable moiety. In some embodiments where an optional tag sequence is included in at least one adaptor, the cleavable moieties are included in the adaptor sequence flanking either end of the tag sequence.

[0048] In one aspect of the invention, methods for preparing a tagged library of target nucleic acid sequences are provided. In some embodiments, methods comprise contacting a nucleic acid sample with a plurality of adaptors capable of amplification of one or more target nucleic acid sequences in the sample under conditions wherein the target nucleic acid(s) undergo a first amplification; digesting resulting first amplification products to reduce or eliminate resulting primer dimers and prepare partially digested target amplicons, thereby producing gapped, double stranded amplicons. The methods further comprise repairing the partially digested target amplicons; then amplifying the repaired target amplicons in a second amplification using universal primers, thereby producing a library of target nucleic acid sequences. Each of the plurality of adaptors used in the methods herein comprise a universal handle sequence and a target nucleic acid sequence and a cleavable moiety and one or more tag sequences. At least two and up to one hundred thousand target specific adaptor pairs are included in the provided methods, wherein the target nucleic acid sequence of each adaptor includes at least one cleavable moiety, the universal handle sequence does not include the cleavable moiety, and the cleavable moieties are included flanking either end of the tag sequence.

[0049] In certain embodiments, the comparable maximal minimum melting temperature of each universal sequence is higher than the comparable maximal minimum melting temperature of each target nucleic acid sequence and each tag sequence present in an adaptor.

[0050] In some embodiments, each of the adaptors comprise unique tag sequences as further described herein and each further comprise cleavable groups flanking either end of the tag sequence in each adaptor. In some embodiments wherein unique taq sequences are employed, each generated target specific amplicon sequence includes at least 1 different sequence and up to 107 different sequences. In certain embodiments each target specific pair of the plurality of adaptors includes up to 16,777,216 different adaptor combinations comprising different tag sequences.

[0051] In some embodiments, methods comprise contacting the plurality of gapped polynucleotide products with digestion and repair reagents simultaneously. In some embodiments, methods comprise contacting the plurality of gapped polynucleotide products sequentially with the digestion then repair reagents.

[0052] A digestion reagent useful in the methods provided herein comprises any reagent capable of cleaving the cleavable site present in adaptors, and in some embodiments includes, but is not limited to, one or a combination of uracil DNA glycosylase (UDG). apurinic endonuclease (e.g., APE1), RecJf, formamidopyrimidine [fapy]-DNA glycosylase (fpg), Nth endonuclease III, endonuclease VIII, polynucleotide kinase (PNK), Taq DNA polymerase, DNA polymerase I and/or human DNA polymerase beta.

[0053] A repair reagent useful in the methods provided herein comprises any reagent capable of repair of the gapped amplicons, and in some embodiments includes, but is not limited to, any one or a combination of Phusion DNA polymerase, Phusion U DNA polymerase, SuperFi DNA polymerase, Taq DNA polymerase, Human DNA polymerase beta, T4 DNA polymerase and/or T7 DNA polymerase, SuperFiU DNA polymerase, E. coli DNA ligase, T3 DNA ligase, T4 DNA ligase, T7 DNA ligase, Taq DNA ligase, and/or 9° N DNA ligase.

[0054] Thus, in certain embodiments, a digestion and repair reagent comprises any one or a combination of one or a combination of uracil DNA glycosylase (UDG). apurinic endonuclease (e.g., APE1), RecJf, formamidopyrimidine [fapy]-DNA glycosylase (fpg), Nth endonuclease III, endonuclease VIII, polynucleotide kinase (PNK), Taq DNA polymerase, DNA polymerase I and/or human DNA polymerase beta; and any one or a combination of Phusion DNA polymerase, Phusion U DNA polymerase, SuperFi DNA polymerase, Taq DNA polymerase, Human DNA polymerase beta, T4 DNA polymerase and/or T7 DNA polymerase, SuperFiU DNA polymerase, E. coli DNA ligase, T3 DNA ligase, T4 DNA ligase, T7 DNA ligase, Taq DNA ligase, and/or 9° N DNA ligase. In certain embodiments, a digestion and repair reagent comprises any one or a combination of uracil DNA glycosylase (UDG), apurinic endonuclease (e.g., APE1), Taq DNA polymerase, Phusion U DNA polymerase, SuperFiU DNA polymerase, T7 DNA ligase. In certain embodiments, a digestion and repair reagent comprises any one or a combination of uracil DNA glycosylase (UDG), formamidopyrimidine [fapy]-DNA glycosylase (fpg), Phusion U DNA polymerase, Taq DNA polymerase, SuperFiU DNA polymerase, T4 PNK and T7 DNA ligase.

[0055] In some embodiments, methods comprise the digestion and repair steps carried out in a single step. In other embodiments, methods comprise the digestion and repair of steps carried out in a temporally separate manner at different temperatures.

[0056] In some embodiments methods of the invention are carried out wherein one or more of the method steps is conducted in manual mode. In particular embodiments, methods of the invention are carried out wherein each of the method steps is conducted manually. In some embodiments methods of the invention are carried out wherein one or more of the method steps is conducted in an automated mode. In particular embodiments, methods of the invention are carried wherein each of the method steps is automated. In some embodiments methods of the invention are carried out wherein one or more of the method steps is conducted in a combination of manual and automated modes.

[0057] In some embodiments, methods of the invention comprise at least one purification step. For example, in certain embodiments a purification step is carried out only after the second amplification of repaired amplicons. In some embodiments two purification steps are utilized, wherein a first purification step is carried out after the digestion and repair and a second purification step is carried out after the second amplification of repaired amplicons.

[0058] In some embodiments a purification step comprises conducting a solid phase adherence reaction, solid phase immobilization reaction or gel electrophoresis. In certain embodiments a purification step comprises separation conducted using Solid Phase Reversible Immobilization (SPRI) beads. In particular embodiments a purification step comprises separation conducted using SPRI beads wherein the SPRI beads comprise paramagnetic beads.

[0059] In some embodiments, methods comprise contacting a nucleic acid sample with a plurality of adaptors capable of amplification of one or more target nucleic acid sequences in the sample under conditions wherein the target nucleic acid(s) undergo a first amplification; digesting resulting first amplification products to reduce or eliminate resulting primer dimers and prepare partially digested target amplicons, thereby producing gapped, double stranded amplicons. The methods further comprise repairing the partially digested target amplicons, then purifying repaired amplicons; then amplifying the repaired target amplicons in a second amplification using universal primers, thereby producing a library of target nucleic acid sequences; and then purifying resulting library. Each of the plurality of adaptors used in the methods herein comprise a universal handle sequence and a target nucleic acid sequence and a cleavable moiety and optionally one or more tag sequences. At least two and up to one hundred thousand target specific adaptor pairs are included in the provided methods, wherein the target nucleic acid sequence of each adaptor includes at least one cleavable moiety and the universal handle sequence does not include the cleavable moiety. In some embodiments where an optional tag sequence is included in at least one adaptor, the cleavable moieties are included in the adaptor sequence flanking either end of the tag sequence.

[0060] In some embodiments, methods comprise contacting a nucleic acid sample with a plurality of adaptors capable of amplification of one or more target nucleic acid sequences in the sample under conditions wherein the target nucleic acid(s) undergo a first amplification; digesting resulting first amplification products to reduce or eliminate resulting primer dimers and prepare partially digested target amplicons, thereby producing gapped, double stranded amplicons. The methods further comprise repairing the partially digested target amplicons, and purifying repaired amplicons; then amplifying the repaired target amplicons in a second amplification using universal primers, thereby producing a library of target nucleic acid sequences; and then purifying resulting library. Each of the plurality of adaptors used in the methods herein comprise a universal handle sequence and a target nucleic acid sequence and a cleavable moiety and one or more tag sequences. At least two and up to one hundred thousand target specific adaptor pairs are included in the provided methods, wherein the target nucleic acid sequence of each adaptor includes at least one cleavable moiety, the universal handle sequence does not include the cleavable moiety, and cleavable moieties are included in the flanking either end of the tag sequence.

[0061] In some embodiments, methods comprise contacting a nucleic acid sample with a plurality of adaptors capable of amplification of one or more target nucleic acid sequences in the sample under conditions wherein the target nucleic acid(s) undergo a first amplification; digesting resulting first amplification products to reduce or eliminate resulting primer dimers and prepare partially digested target amplicons, thereby producing gapped, double stranded amplicons. The methods further comprise repairing the partially digested target amplicons, then purifying repaired amplicons; then amplifying the repaired target amplicons in a second amplification using universal primers, thereby producing a library of target nucleic acid sequences; and then purifying resulting library. Each of the plurality of adaptors used in the methods herein comprise a universal handle sequence and a target nucleic acid sequence and a cleavable moiety and optionally one or more tag sequences. At least two and up to one hundred thousand target specific adaptor pairs are included in the provided methods, wherein the target nucleic acid sequence of each adaptor includes at least one cleavable moiety and the universal handle sequence does not include the cleavable moiety. In some embodiments where an optional tag sequence is included in at least one adaptor, the cleavable moieties are included in the adaptor sequence flanking either end of the tag sequence. In some embodiments a digestion and repair reagent comprises any one or a combination of one or a combination of uracil DNA glycosylase (UDG). apurinic endonuclease (e.g., APE1), RecJf, formamidopyrimidine [fapy]-DNA glycosylase (fpg), Nth endonuclease III, endonuclease VIII, polynucleotide kinase (PNK), Taq DNA polymerase, DNA polymerase I and/or human DNA polymerase beta; and any one or a combination of Phusion DNA polymerase, Phusion U DNA polymerase, SuperFi DNA polymerase, Taq DNA polymerase, Human DNA polymerase beta, T4 DNA polymerase and/or T7 DNA polymerase, SuperFiU DNA polymerase, E. coli DNA ligase, T3 DNA ligase, T4 DNA ligase, T7 DNA ligase, Taq DNA ligase, and/or 9° N DNA ligase. In certain embodiments, a digestion and repair reagent comprises any one or a combination of uracil DNA glycosylase (UDG), apurinic endonuclease (e.g., APE1), Taq DNA polymerase, Phusion U DNA polymerase, SuperFiU DNA polymerase, T7 DNA ligase. In certain embodiments, a digestion and repair reagent comprises any one or a combination of uracil DNA glycosylase (UDG), formamidopyrimidine [fapy]-DNA glycosylase (fpg), Phusion U DNA polymerase, Taq DNA polymerase, SuperFiU DNA polymerase, T4 PNK and T7 DNA ligase.

[0062] In some embodiments, methods comprise contacting a nucleic acid sample with a plurality of adaptors capable of amplification of one or more target nucleic acid sequences in the sample under conditions wherein the target nucleic acid(s) undergo a first amplification; digesting resulting first amplification products to reduce or eliminate resulting primer dimers and prepare partially digested target amplicons, thereby producing gapped, double stranded amplicons. The methods further comprise repairing the partially digested target amplicons, and purifying repaired amplicons; then amplifying the repaired target amplicons in a second amplification using universal primers, thereby producing a library of target nucleic acid sequences; and then purifying resulting library. Each of the plurality of adaptors used in the methods herein comprise a universal handle sequence and a target nucleic acid sequence and a cleavable moiety and one or more tag sequences. At least two and up to one hundred thousand target specific adaptor pairs are included in the provided methods, wherein the target nucleic acid sequence of each adaptor includes at least one cleavable moiety, the universal handle sequence does not include the cleavable moiety, and cleavable moieties are included in the flanking either end of the tag sequence. In some embodiments a digestion and repair reagent comprises any one or a combination of one or a combination of uracil DNA glycosylase (UDG). apurinic endonuclease (e.g., APE1), RecJf, formamidopyrimidine [fapy]-DNA glycosylase (fpg), Nth endonuclease III, endonuclease VIII, polynucleotide kinase (PNK), Taq DNA polymerase, DNA polymerase I and/or human DNA polymerase beta; and any one or a combination of Phusion DNA polymerase, Phusion U DNA polymerase, SuperFi DNA polymerase, Taq DNA polymerase, Human DNA polymerase beta, T4 DNA polymerase and/or T7 DNA polymerase, SuperFiU DNA and/or 9° N DNA ligase. In certain embodiments, a digestion and repair reagent comprises any one or a combination of uracil DNA glycosylase (UDG), apurinic endonuclease (e.g., APE1), Taq DNA polymerase, Phusion U DNA polymerase, SuperFiU DNA polymerase, T7 DNA ligase. In certain embodiments, a digestion and repair reagent comprises any one or a combination of uracil DNA glycosylase (UDG), formamidopyrimidine [fapy]-DNA glycosylase (fpg), Phusion U DNA polymerase, Taq DNA polymerase, SuperFiU DNA polymerase, T4 PNK and T7 DNA ligase.

[0063] In certain embodiments methods of the invention are carried out in a single, addition only workflow reaction, allowing for rapid production of highly multiplexed targeted libraries. For example, in one embodiment, methods for preparing a library of target nucleic acid sequences comprise contacting a nucleic acid sample with a plurality of adaptors capable of amplification of one or more target nucleic acid sequences in the sample under conditions wherein the target nucleic acid(s) undergo a first amplification; digesting resulting first amplification products to reduce or eliminate resulting primer dimers and prepare partially digested target amplicons, thereby producing gapped, double stranded amplicons. The methods further comprise repairing the partially digested target amplicons; then amplifying the repaired target amplicons in a second amplification using universal primers, thereby producing a library of target nucleic acid sequences, and purifying the resulting library. In certain embodiments the purification comprises a single or repeated separating step that is carried out following production of the library following the second amplification; and wherein the other method steps are conducted in a single reaction vessel without requisite transferring of a portion (aliquot) of any of the products generated in steps to another reaction vessel. Each of the plurality of adaptors used in the methods herein comprise a universal handle sequence and a target nucleic acid sequence and a cleavable moiety and optionally one or more tag sequences. At least two and up to one hundred thousand target specific adaptor pairs are included in the provided methods, wherein the target nucleic acid sequence of each adaptor includes at least one cleavable moiety and the universal handle sequence does not include the cleavable moiety. In some embodiments where an optional tag sequence is included in at least one adaptor, the cleavable moieties are included in the adaptor sequence flanking either end of the tag sequence.

[0064] In another embodiment, methods for preparing a tagged library of target nucleic acid sequences are provided comprising contacting a nucleic acid sample with a plurality of adaptors capable of amplification of one or more target nucleic acid sequences in the sample under conditions wherein the target nucleic acid(s) undergo a first amplification; digesting resulting first amplification products to reduce or eliminate resulting primer dimers and prepare partially digested target amplicons, thereby producing gapped, double stranded amplicons. The methods further comprise repairing the partially digested target amplicons; then amplifying the repaired target amplicons in a second amplification using universal primers, thereby producing a library of target nucleic acid sequences, and purifying the resulting library. In certain embodiments the purification comprises a single or repeated separating step; and wherein the other method steps are optionally conducted in a single reaction vessel without requisite transferring of a portion of any of the products generated in steps to another reaction vessel. Each of the plurality of adaptors used in the methods herein comprise a universal handle sequence and a target nucleic acid sequence and a cleavable moiety and one or more tag sequences. At least two and up to one hundred thousand target specific adaptor pairs are included in the provided methods, wherein the target nucleic acid sequence of each adaptor includes at least one cleavable moiety, the universal handle sequence does not include the cleavable moiety, and the cleavable moieties are included flanking either end of the tag sequence.

[0065] In one embodiment, methods for preparing a library of target nucleic acid sequences comprise contacting a nucleic acid sample with a plurality of adaptors capable of amplification of one or more target nucleic acid sequences in the sample under conditions wherein the target nucleic acid(s) undergo a first amplification; digesting resulting first amplification products to reduce or eliminate resulting primer dimers and prepare partially digested target amplicons, thereby producing gapped, double stranded amplicons. The methods further comprise repairing the partially digested target amplicon; then amplifying the repaired target amplicons in a second amplification using universal primers, thereby producing a library of target nucleic acid sequences, and purifying the resulting library.

[0066] In some embodiments a digestion reagent comprises any one or any combination of: uracil DNA glycosylase (UDG). AP endonuclease (APE1), RecJf, formamidopyrimidine [fapy]-DNA glycosylase (fpg), Nth endonuclease III, endonuclease VIII, polynucleotide kinase, Taq DNA polymerase, DNA polymerase I and/or human DNA polymerase beta. In certain embodiments a digestion reagent comprises any one or any combination of: uracil DNA glycosylase (UDG). AP endonuclease (APE1), RecJf, formamidopyrimidine [fapy]-DNA glycosylase (fpg), Nth endonuclease III, endonuclease VIII, polynucleotide kinase, Taq DNA polymerase, DNA polymerase I and/or human DNA polymerase beta wherein the digestion reagent lacks formamidopyrimidine [fapy]-DNA glycosylase (fpg).

[0067] In some embodiments a digestion reagent comprises a single-stranded DNA exonuclease that degrades in a 5′-3′ direction. In some embodiments a cleavage reagent comprises a single-stranded DNA exonuclease that degrades abasic sites. In some embodiments herein the digestions reagent comprises an RecJf exonuclease. In particular embodiments a digestion reagent comprises APE1 and RecJf, wherein the cleavage reagent comprises an apurinic/apyrimidinic endonuclease. In certain embodiments the digestion reagent comprises an AP endonuclease (APE1).

[0068] In some embodiments a repair reagent comprises at least one DNA polymerase; wherein the gap-filling reagent comprises: any one or any combination of: Phusion DNA polymerase, Phusion U DNA polymerase, SuperFi DNA polymerase, Taq DNA polymerase, Human DNA polymerase beta, T4 DNA polymerase and/or T7 DNA polymerase and/or SuperFi U DNA polymerase. In some embodiments a repair reagent further comprises a plurality of nucleotides.

[0069] In some embodiment a repair reagent comprises an ATP-dependent or an ATP-independent ligase; wherein the repair reagent comprises any one or any combination of: E. coli DNA ligase, T3 DNA ligase, T4 DNA ligase, T7 DNA ligase, Taq DNA ligase, 9° N DNA ligase

[0070] In certain embodiments a digestion and repair reagent comprises any one or a combination of one or a combination of uracil DNA glycosylase (UDG). apurinic endonuclease (e.g., APE1), RecJf, formamidopyrimidine [fapy]-DNA glycosylase (fpg), Nth endonuclease III, endonuclease VIII, polynucleotide kinase (PNK), Taq DNA polymerase, DNA polymerase I and/or human DNA polymerase beta; and any one or a combination of Phusion DNA polymerase, Phusion U DNA polymerase, SuperFi DNA polymerase, Taq DNA polymerase, Human DNA polymerase beta, T4 DNA polymerase and/or T7 DNA polymerase, SuperFiU DNA polymerase, E. coli DNA ligase, T3 DNA ligase, T4 DNA ligase, T7 DNA ligase, Taq DNA ligase, and/or 9° N DNA ligase. In particular embodiments, a digestion and repair reagent comprises any one or a combination of uracil DNA glycosylase (UDG), apurinic endonuclease (e.g., APE1), Taq DNA polymerase, Phusion U DNA polymerase, SuperFiU DNA polymerase, T7 DNA ligase. In certain embodiments a purification comprises a single or repeated separating step that is carried out following production of the library following the second amplification; and wherein method steps are conducted in a single reaction vessel without requisite transferring of a portion of any of the products generated in steps to another reaction vessel until a first purification. Each of the plurality of adaptors used in the methods herein comprise a universal handle sequence and a target nucleic acid sequence and a cleavable moiety and optionally one or more tag sequences. At least two and up to one hundred thousand target specific adaptor pairs are included in the provided methods, wherein the target nucleic acid sequence of each adaptor includes at least one cleavable moiety and the universal handle sequence does not include the cleavable moiety. In some embodiments where an optional tag sequence is included in at least one adaptor, the cleavable moieties are included in the adaptor sequence flanking either end of the tag sequence.

[0071] In another embodiment, methods for preparing a tagged library of target nucleic acid sequences are provided comprising contacting a nucleic acid sample with a plurality of adaptors capable of amplification of one or more target nucleic acid sequences in the sample under conditions wherein the target nucleic acid(s) undergo a first amplification; digesting resulting first amplification products to reduce or eliminate resulting primer dimers and prepare partially digested target amplicons, thereby producing gapped, double stranded amplicons. The methods further comprise repairing the partially digested target amplicons; then amplifying the repaired target amplicons in a second amplification using universal primers, thereby producing a library of target nucleic acid sequences, and purifying the resulting library. In certain embodiments a digestion and repair reagent comprises any one or a combination of one or a combination of uracil DNA glycosylase (UDG). apurinic endonuclease (e.g., APE1), RecJf, formamidopyrimidine [fapy]-DNA glycosylase (fpg), Nth endonuclease III, endonuclease VIII, polynucleotide kinase (PNK), Taq DNA polymerase, DNA polymerase I and/or human DNA polymerase beta; and any one or a combination of Phusion DNA polymerase, Phusion U DNA polymerase, SuperFi DNA polymerase, Taq DNA polymerase, Human DNA polymerase beta, T4 DNA polymerase and/or T7 DNA polymerase, SuperFiU DNA polymerase, E. coli DNA ligase, T3 DNA ligase, T4 DNA ligase, T7 DNA ligase, Taq DNA ligase, and/or 9° N DNA ligase. In particular embodiments, a digestion and repair reagent comprises any one or a combination of uracil DNA glycosylase (UDG), apurinic endonuclease (e.g., APE1), Taq DNA polymerase, Phusion U DNA polymerase, SuperFiU DNA polymerase, T7 DNA ligase. In certain embodiments the purification comprises a single or repeated separating step that is carried out following production of the library following the second amplification; and wherein steps the other method steps are conducted in a single reaction vessel without requisite transferring of a portion (aliquot) of any of the products generated in steps to another reaction vessel. Each of the plurality of adaptors used in the methods herein comprise a universal handle sequence and a target nucleic acid sequence and a cleavable moiety and one or more tag sequences. At least two and up to one hundred thousand target specific adaptor pairs are included in the provided methods, wherein the target nucleic acid sequence of each adaptor includes at least one cleavable moiety, the universal handle sequence does not include the cleavable moiety, and the cleavable moieties are included flanking either end of the tag sequence.

[0072] In some embodiments, adaptor-dimer byproducts resulting from the first amplification of step of the methods are largely removed from the resulting library. In certain embodiments the enriched population of amplified target nucleic acids contains a reduced amount of adaptor-dimer byproduct. In particular embodiments adaptor dimer byproducts are eliminated.

[0073] In some embodiments, the library is prepared in less than 4 hours. In some embodiments, the library is prepared, enriched and sequenced in less than 3 hours. In some embodiments, the library is prepared, enriched and sequenced in 2 to 3 hours. In some embodiments, the library is prepared in approximately 2.5 hours. In some embodiments, the library is prepared in approximately 2.75 hours. In some embodiments, the library is prepared in approximately 3 hours.

### Compositions

[0074] Additional aspects of the invention comprise composition comprising a plurality of nucleic acid adaptors, as well as library compositions prepared according to the methods of the invention. Provided compositions are useful in conjunction with the methods described herein as well as for additional analysis and applications known in the art.

[0075] Thus, provided are composition comprising a plurality of nucleic acid adaptors, wherein each of the plurality of adaptors comprises a 5′ universal handle sequence, optionally one or more tag sequences, and a 3′ target nucleic acid sequence wherein each adaptor comprises a cleavable moiety, wherein the target nucleic acid sequence of the adaptor includes at least one cleavable moiety, and when tag sequences are present cleavable moieties are included flanking either end of the tag sequence and wherein the universal handle sequence does not include the cleavable moiety. At least two and up to one hundred thousand target specific adaptor pairs are included in provided compositions. Provided composition allow for rapid production of highly multiplexed targeted libraries.

[0076] In some embodiments, provided compositions comprise plurality of nucleic acid adaptors, wherein each of the plurality of adaptors comprise a 5′ universal handle sequence, one or more tag sequences, and a 3′ target nucleic acid sequence wherein each adaptor comprises a cleavable moiety; wherein the target nucleic acid sequence of the adaptor includes at least one cleavable moiety, cleavable moieties are included flanking either end of the tag sequence and the universal handle sequence does not include the cleavable moiety. At least two and up to one hundred thousand target specific adaptor pairs are included in provided compositions. Provided composition allow for rapid production of highly multiplexed, tagged, targeted libraries.

[0077] Primer/adaptor compositions may be single stranded or double stranded. In some embodiments adaptor compositions comprise are single stranded adaptors. In some embodiments adaptor compositions comprise double stranded adaptors. In some embodiments adaptor compositions comprise a mixture of single stranded and double stranded adaptors.

[0078] In some embodiments, compositions include a plurality of adaptors capable of amplification of one or more target nucleic acid sequences comprising a multiplex of adaptor pairs capable of amplification of at least two different target nucleic acid sequences wherein the target-specific primer sequence is substantially non-complementary to other target specific primer sequences in the composition. In some embodiments, the composition comprises at least 25, 50, 75, 100, 150, 200, 250, 300, 350, 400, 450, 500, 750, 1000, 1250, 1500, 1750, 2000, 2250, 2500, 2750, 3000, 3250, 3500, 3750, 4000, 4500, 5000, 5500, 6000, 7000, 8000, 9000, 10000, 11000, or 12000, or more target-specific adaptor pairs. In some embodiments, target-specific adaptor pairs comprise about 15 nucleotides to about 40 nucleotides in length, wherein at least one nucleotide is replaced with a cleavable group. In some embodiments the cleavable group is a uridine nucleotide. In some embodiments, the target-specific adaptor pairs are designed to amplify an exon, gene, exome or region of the genome associated with a clinical or pathological condition, e.g., amplification of one or more sites comprising one or more mutations (e.g., driver mutation) associated with a cancer, e.g., lung, colon, breast cancer, etc., or amplification of mutations associated with an inherited disease, e.g., cystic fibrosis, muscular dystrophies, etc. In some embodiments, the target-specific adaptor pairs when hybridized to a target sequence and amplified as provided herein generates a library of adaptor-ligated amplified target sequences that are about 100 to about 600 base pairs in length. In some embodiments, no one adaptor-ligated amplified target sequence is overexpressed in the library by more than 30% as compared to the remainder of other adaptor-ligated amplified target sequences in the library. In some embodiments, an adaptor-ligated amplified target sequence library is substantially homogenous with respect to GC content, amplified target sequence length or melting temperature (Tm) of the respective target sequences.

[0079] In some embodiments, the target-specific primer sequences of adaptor pairs in the compositions of the invention are target-specific sequences that can amplify specific regions of a nucleic acid molecule. In some embodiments, the target-specific adaptors can amplify genomic DNA or cDNA. In some embodiments, target-specific adaptors can amplify mammalian nucleic acid, such as, but not limited to human DNA or RNA, murine DNA or RNA, bovine DNA or RNA, canine DNA or RNA, equine DNA or RNA, or any other mammal of interest. In other embodiments, target specific adaptors include sequences directed to amplify plant nucleic acids of interest. In other embodiments, target specific adaptors include sequences directed to amplify infectious agents, e.g., bacterial and/or viral nucleic acids. In some embodiments, the amount of nucleic acid required for selective amplification is from about 1 ng to 1 microgram. In some embodiments, the amount of nucleic acid required for selective amplification of one or more target sequences is about 1 ng, about 5 ng or about 10 ng. In some embodiments, the amount of nucleic acid required for selective amplification of target sequence is about 10 ng to about 200 ng.

[0080] As described herein, each of the plurality of adaptors comprises a 5′ universal handle sequence. In some embodiments a universal handle sequence comprises any one or any combination of an amplification primer binding sequence, a sequencing primer binding sequence and/or a capture primer binding sequence. In some embodiments the comparable maximal minimum melting temperatures of each adaptor universal handle sequence is higher than the comparable maximal minimum melting temperatures of each target nucleic acid sequence and each tag sequence present in the same adaptor. Preferably, the universal handle sequences of provided adaptors do not exhibit significant complementarity and/or hybridization to any portion of a unique tag sequence and/or target nucleic acid sequence of interest. In some embodiments a first universal handle sequence comprises any one or any combination of an amplification primer binding sequence, a sequencing primer binding sequence and/or a capture primer binding sequence. In some embodiments a second universal handle sequence comprises any one or any combination of an amplification primer binding sequence, a sequencing primer binding sequence and/or a capture primer binding sequence. In certain embodiments first and second universal handle sequences correspond to forward and reverse universal handle sequences and in certain embodiments the same first and second universal handle sequences are included for each of the plurality of target specific adaptor pairs. Such forward and reverse universal handle sequences are targeted in conjunction with universal primers to carry out a second amplification of repaired amplicons in production of libraries according to methods of the invention. In certain embodiments a first 5′ universal handle sequence comprises two universal handle sequences (e.g., a combination of an amplification primer binding sequence, a sequencing primer binding sequence and/or a capture primer binding sequence); and a second 5′ universal sequence comprises two universal handle sequences (e.g., a combination of an amplification primer binding sequence, a sequencing primer binding sequence and/or a capture primer binding sequence), wherein the 5′ first and second universal handle sequences do not exhibit significant hybridization to any portion of a target nucleic acid sequence of interest.

[0081] The structure and properties of universal amplification primers or universal primers are well known to those skilled in the art and can be implemented for utilization in conjunction with provided methods and compositions to adapt to specific analysis platforms. Universal handle sequences of the adaptors provided herein are adapted accordingly to accommodate a preferred universal primer sequences. For example, e.g., as described herein universal P1 and A primers with optional barcode sequences have been described in the art and utilized for sequencing on Ion Torrent sequencing platforms (Ion Xpress™ Adapters. Thermo Fisher Scientific). Similarly, additional and other universal adaptor/primer sequences described and known in the art (e.g., Illumina universal adaptor/primer sequences can be found, e.g., at //support.illumina.com/content/dam/illumina-support/documents/documentation/chemistry_documentation/experiment-design/illumina-adapter-sequences_1000000002694-01.pdf: PacBio universal adaptor/primer sequences, can be found. e.g., at //s3.amazonaws.com/files.pacb.com/pdf/Guide_Pacific_Biosciences_Template_Preparation_and_Sequencing.pdf; etc.) can be used in conjunction with the methods and compositions provided herein. Suitable universal primers of appropriate nucleotide sequence for use with adaptors of the invention are readily prepared using standard automated nucleic acid synthesis equipment and reagents in routine use in the art. One single type of universal primer or separate types (or even a mixture) of two different universal primers, for example a pair of universal amplification primers suitable for amplification of repaired amplicons in a second amplification are included for use in the methods of the invention. Universal primers optionally include a different tag (barcode) sequence, where the tag (barcode) sequence does not hybridize to the adaptor. Barcode sequences incorporated into amplicons in a second universal amplification can be utilized e.g., for effective identification of sample source.

[0082] In some embodiments adaptors further comprise a unique tag sequence located between the 5′ first universal handle sequence and the 3′ target-specific sequence, and wherein the unique tag sequence does not exhibit significant complementarity and/or hybridization to any portion of a unique tag sequence and/or target nucleic acid sequence of interest. In some embodiments the plurality of primer adaptor pairs has 10⁴-10⁹ different tag sequence combinations. Thus in certain embodiments each generated target specific adaptor pair comprises 10⁴-10⁹ different tag sequences. In some embodiments the plurality of primer adaptors comprise each target specific adaptor comprising at least 1 different unique tag sequence and up to 10⁵ different unique tag sequences. In some embodiments the plurality of primer adaptors comprise each target specific adaptor comprising at least 1 different unique tag sequence and up to 10⁵ different unique tag sequences. In certain embodiments each generated target specific amplicon generated comprises at least two and up to 10⁹ different adaptor combinations comprising different tag sequences, each having two different unique tag sequences. In some embodiments the plurality of primer adaptors comprise each target specific adaptor comprising 4096 different tag sequences. In certain embodiments each generated target specific amplicon generated comprises up to 16,777,216 different adaptor combinations comprising different tag sequences, each having two different unique tag sequences.

[0083] In some embodiments individual primer adaptors in the plurality of adaptors include a unique tag sequence (e.g., contained in a tag adaptor) comprising different random tag sequences alternating with fixed tag sequences. In some embodiments, the at least one unique tag sequence comprises a at least one random sequence and at least one fixed sequence, or comprises a random sequence flanked on both sides by a fixed sequence, or comprises a fixed sequence flanked on both sides by a random sequence. In some embodiments a unique tag sequence includes a fixed sequence that is 2-2000 nucleotides or base-pairs in length. In some embodiments a unique tag sequence includes a random sequence that is 2-2000 nucleotides or base-pairs in length.

[0084] In some embodiments, unique tag sequences include a sequence having at least one random sequence interspersed with fixed sequences. In some embodiments, individual tag sequences in a plurality of unique tags have the structure (N)ₙ(X)ₓ(M)ₘ(Y)_{y}, wherein “N” represents a random tag sequence that is generated from A, G, C, T, U or I, and wherein “n” is 2-10 which represents the nucleotide length of the “N” random tag sequence; wherein “X” represents a fixed tag sequence, and wherein “x” is 2-10 which represents the nucleotide length of the “X” random tag sequence; wherein “M” represents a random tag sequence that is generated from A, G, C, T, U or I, wherein the random tag sequence “M” differs or is the same as the random tag sequence “N”, and wherein “m” is 2-10 which represents the nucleotide length of the “f” random tag sequence; and wherein “Y” represents a fixed tag sequence, wherein the fixed tag sequence of “Y” is the same or differs from the fixed tag sequence of “X”, and wherein “y” is 2-10 which represents the nucleotide length of the “Y” random tag sequence. In some embodiments, the fixed tag sequence “X” is the same in a plurality of tags. In some embodiments, the fixed tag sequence “X” is different in a plurality of tags. In some embodiments, the fixed tag sequence “Y” is the same in a plurality of tags. In some embodiments, the fixed tag sequence “Y” is different in a plurality of tags. In some embodiments, the fixed tag sequences “(X)ₓ” and “(Y)_{y}” within the plurality of adaptors are sequence alignment anchors.

[0085] In some embodiments, the random sequence within a unique tag sequence is represented by “N”, and the fixed sequence is represented by “X”. Thus, a unique tag sequence is represented by N₁N₂N₃X₁X₂X₃ or by N₁N₂N₃X₁X₂X₃N₄N₅N₆X₄X₅X₆. Optionally, a unique tag sequence can have a random sequence in which some or all of the nucleotide positions are randomly selected from a group consisting of A, G, C, T, U and I. For example, a nucleotide for each position within a random sequence is independently selected from any one of A, G, C, T, U or I, or is selected from a subset of these six different types of nucleotides. Optionally, a nucleotide for each position within a random sequence is independently selected from any one of A, G, C or T. In some embodiments, the first fixed tag sequence “X₁X₂X₃” is the same or different sequence in a plurality of tags. In some embodiments, the second fixed tag sequence “X₄X₅X₆” is the same or different sequence in a plurality of tags. In some embodiments, the first fixed tag sequence “X₁X₂X₃” and the second fixed tag sequence “X₄X₅X₆” within the plurality of adaptors are sequence alignment anchors.

[0086] In some embodiments, a unique tag sequence comprises the sequence 5′-NNNACTNNNTGA-3′, where “N” represents a position within the random sequence that is generated randomly from A, G, C or T, the number of possible distinct random tags is calculated to be 4⁶ (or 4\hat{ }6) is about 4096, and the number of possible different combinations of two unique tags is 4¹² (or 4\hat{ }12) is about 16.78 million. In some embodiments, the underlined portions of 5′-NNNACTNNNTGA-3′ are a sequence alignment anchor.

[0087] In some embodiments, the fixed sequences within the unique tag sequence is a sequence alignment anchor that can be used to generate error-corrected sequencing data. In some embodiments fixed sequences within the unique tag sequence is a sequence alignment anchor that can be used to generate a family of error-corrected sequencing reads.

[0088] Adaptors provided herein comprise at least one cleavable moiety. In some embodiments a cleavable moiety is within the 3′ target-specific sequence. In some embodiments a cleavable moiety is at or near the junction between the 5′ first universal handle sequence and the 3′ target-specific sequence. In some embodiments a cleavable moiety is at or near the junction between the 5′ first universal handle sequence and the unique tag sequence, and at or near the junction between the unique tag sequence and the 3′ target-specific sequence. The cleavable moiety can be present in a modified nucleotide, nucleoside or nucleobase. In some embodiments, the cleavable moiety can include a nucleobase not naturally occurring in the target sequence of interest.

[0089] In some embodiments the at least one cleavable moiety in the plurality of adaptors is a uracil base, uridine or a deoxyuridine nucleotide. In some embodiments a cleavable moiety is within the 3′ target-specific sequence and the junctions between the 5′ universal handle sequence and the unique tag sequence and/or the 3′ target specific sequence wherein the at least one cleavable moiety in the plurality of adaptors is cleavable with uracil DNA glycosylase (UDG). In some embodiments, a cleavable moiety is cleaved, resulting in a susceptible abasic site, wherein at least one enzyme capable of reacting on the abasic site generates a gap comprising an extendible 3′ end. In certain embodiments the resulting gap comprises a 5′-deoxyribose phosphate group. In certain embodiments the resulting gap comprises an extendible 3′ end and a 5′ ligatable phosphate group.

[0090] In another embodiment, inosine can be incorporated into a DNA-based nucleic acid as a cleavable group. In one exemplary embodiment, EndoV can be used to cleave near the inosine residue. In another exemplary embodiment, the enzyme hAAG can be used to cleave inosine residues from a nucleic acid creating abasic sites.

[0091] Where a cleavable moiety is present, the location of the at least one cleavable moiety in the adaptors does not significantly change the melting temperature (Tm) of any given double-stranded adaptor in the plurality of double-stranded adaptors. The melting temperatures (Tm) of any two given double-stranded adaptors from the plurality of double-stranded adaptors are substantially the same, wherein the melting temperatures (Tm) of any two given double-stranded adaptors does not differ by more than 10° C. of each other. However, within each of the plurality of adaptors, the melting temperatures of sequence regions differs, such that the comparable maximal minimum melting temperature of, for example, the universal handle sequence, is higher than the comparable maximal minimum melting temperatures of either the unique tag sequence and/or the target specific sequence of any adaptor. This localized differential in comparable maximal minimum melting temperatures can be adjusted to optimize digestion and repair of amplicons and ultimately improved effectiveness of the methods provided herein.

[0092] Further provided are compositions comprising a nucleic acid library generated by methods of the invention. Thus, provided are composition comprising a plurality of amplified target nucleic acid amplicons, wherein each of the plurality of amplicons comprises a 5′ universal handle sequence, optionally a first unique tag sequences, an intermediate target nucleic acid sequence, optionally a second unique tag sequences and a 3′ universal handle sequence. At least two and up to one hundred thousand target specific amplicons are included in provided compositions. Provided compositions include highly multiplexed targeted libraries. In some embodiments, provided compositions comprise a plurality of nucleic acid amplicons, wherein each of the plurality of amplicons comprise a a 5′ universal handle sequence, a first unique tag sequences, an intermediate target nucleic acid sequence, a second unique tag sequences and a 3′ universal handle sequence. At least two and up to one hundred thousand target specific tagged amplicons are included in provided compositions. Provided compositions include highly multiplexed tagged targeted libraries.

[0093] In some embodiments, library compositions include a plurality of target specific amplicons comprising a multiplex of at least two different target nucleic acid sequences. In some embodiments, the composition comprises at least 25, 50, 75, 100, 150, 200, 250, 300, 350, 400, 450, 500, 750, 1000, 1250, 1500, 1750, 2000, 2250, 2500, 2750, 3000, 3250, 3500, 3750, 4000, 4500, 5000, 5500, 6000, 7000, 8000, 9000, 10000, 11000, or 12000, or more target-specific amplicons. In some embodiments, the target-specific amplicons comprise one or more exon, gene, exome or region of the genome associated with a clinical or pathological condition, e.g., amplicons comprising one or more sites comprising one or more mutations (e.g., driver mutation) associated with a cancer, e.g., lung, colon, breast cancer, etc., or amplicons comprising mutations associated with an inherited disease, e.g., cystic fibrosis, muscular dystrophies, etc. In some embodiments, the target-specific amplicons comprise a library of adaptor-ligated amplicon target sequences that are about 100 to about 750 base pairs in length.

[0094] As described herein, each of the plurality of amplicons comprises a 5′ universal handle sequence. In some embodiments a universal handle sequence comprises any one or any combination of an amplification primer binding sequence, a sequencing primer binding sequence and/or a capture primer binding sequence. Preferably, the universal handle sequences of provided adaptors do not exhibit significant complementarity and/or hybridization to any portion of a unique tag sequence and/or target nucleic acid sequence of interest. In some embodiments a first universal handle sequence comprises any one or any combination of an amplification primer binding sequence, a sequencing primer binding sequence and/or a capture primer binding sequence. In some embodiments a second universal handle sequence comprises any one or any combination of an amplification primer binding sequence, a sequencing primer binding sequence and/or a capture primer binding sequence. In certain embodiments first and second universal handle sequences correspond to forward and reverse universal handle sequences and in certain embodiments the same first and second universal handle sequences are included for each of the plurality of target specific amplicons. Such forward and reverse universal handle sequences are targeted in conjunction with universal primers to carry out a second amplification of a preliminary library composition in production of resulting amplified according to methods of the invention. In certain embodiments a first 5′ universal handle sequence comprises two universal handle sequences (e.g., a combination of an amplification primer binding sequence, a sequencing primer binding sequence and/or a capture primer binding sequence); and a second 5′ universal sequence comprises two universal handle sequences (e.g., a combination of an amplification primer binding sequence, a sequencing primer binding sequence and/or a capture primer binding sequence), wherein the 5′ first and second universal handle sequences do not exhibit significant hybridization to any portion of a target nucleic acid sequence of interest.

[0095] The structure and properties of universal amplification primers or universal primers are well known to those skilled in the art and can be implemented for utilization in conjunction with provided methods and compositions to adapt to specific analysis platforms. Universal handle sequences of the adaptors and amplicons provided herein are adapted accordingly to accommodate a preferred universal primer sequences. For example, e.g., as described herein universal P1 and A primers with optional barcode sequences have been described in the art and utilized for sequencing on Ion Torrent sequencing platforms (Ion Xpress™ Adapters, Thermo Fisher Scientific). Similarly, additional and other universal adaptor/primer sequences described and known in the art (e.g., Illumina universal adaptor/primer sequences can be found, e.g., at //support.illumina.com/content/dam/illumina-support/documents/documentation/chemistry_documentation/experiment-design/illumina-adapter-sequences_1000000002694-01.pdf, PacBio universal adaptor/primer sequences, can be found, e.g., at //s3.amazonaws.com/files.pacb.com/pdf/Guide_Pacific_Biosciences_Template_Preparation_and_Seq uencing.pdf; etc.) can be used in conjunction with the methods and compositions provided herein. Suitable universal primers of appropriate nucleotide sequence for use with libraries of the invention are readily prepared using standard automated nucleic acid synthesis equipment and reagents in routine use in the art. One single type or separate types (or even a mixture) of two different universal primers, for example a pair of universal amplification primers suitable for amplification of a preliminary library may be used in production of the libraries of the invention. Universal primers optionally include a tag (barcode) sequence, where the tag (barcode) sequence does not hybridize to adaptor sequence or to target nucleic acid sequences. Barcode sequences incorporated into amplicons in a second universal amplification can be utilized e.g., for effective identification of sample source to thereby generate a barcoded library. Thus provided compositions include highly multiplexed barcoded targeted libraries. Provided compositions also include highly multiplexed barcoded tagged targeted libraries.

[0096] In some embodiments amplicon libraries comprise a unique tag sequence located between the 5′ first universal handle sequence and the 3′ target-specific sequence, and wherein the unique tag sequence does not exhibit significant complementarity and/or hybridization to any portion of a unique tag sequence and/or target nucleic acid sequence. In some embodiments the plurality of amplicons has 10⁴-10⁹ different tag sequence combinations. Thus in certain embodiments each of the plurality of amplicons in a library comprises 10⁴-10⁹ different tag sequences. In some embodiments each of the plurality of amplicons in a library comprises at least 1 different unique tag sequence and up to 10⁵ different unique tag sequences. In certain embodiments each target specific amplicon in a library comprises at least two and up to 10⁹ different combinations comprising different tag sequences, each having two different unique tag sequences. In some embodiments each of the plurality of amplicons in a library comprise a tag sequence comprising 4096 different tag sequences. In certain embodiments each target specific amplicon of a library comprises up to 16,777,216 different combinations comprising different tag sequences, each having two different unique tag sequences.

[0097] In some embodiments individual amplicons in the plurality of amplicons of a library include a unique tag sequence (e.g., contained in a tag adaptor sequence) comprising different random tag sequences alternating with fixed tag sequences. In some embodiments, the at least one unique tag sequence comprises a at least one random sequence and at least one fixed sequence, or comprises a random sequence flanked on both sides by a fixed sequence, or comprises a fixed sequence flanked on both sides by a random sequence. In some embodiments a unique tag sequence includes a fixed sequence that is 2-2000 nucleotides or base-pairs in length. In some embodiments a unique tag sequence includes a random sequence that is 2-2000 nucleotides or base-pairs in length.

[0098] In some embodiments, unique tag sequences include a sequence having at least one random sequence interspersed with fixed sequences. In some embodiments, individual tag sequences in a plurality of unique tags have the structure (N)ₙ(X)ₓ(M)ₘ(Y)_{y}, wherein “N” represents a random tag sequence that is generated from A, G, C, T, U or I, and wherein “n” is 2-10 which represents the nucleotide length of the “N” random tag sequence; wherein “X” represents a fixed tag sequence, and wherein “x” is 2-10 which represents the nucleotide length of the “X” random tag sequence; wherein “M” represents a random tag sequence that is generated from A, G, C, T, U or I, wherein the random tag sequence “M” differs or is the same as the random tag sequence “N”, and wherein “m” is 2-10 which represents the nucleotide length of the “M” random tag sequence; and wherein “Y” represents a fixed tag sequence, wherein the fixed tag sequence of “Y” is the same or differs from the fixed tag sequence of “X”, and wherein “y” is 2-10 which represents the nucleotide length of the “Y” random tag sequence. In some embodiments, the fixed tag sequence “X” is the same in a plurality of tags. In some embodiments, the fixed tag sequence “X” is different in a plurality of tags. In some embodiments, the fixed tag sequence “Y” is the same in a plurality of tags. In some embodiments, the fixed tag sequence “Y” is different in a plurality of tags. In some embodiments, the fixed tag sequences “(X)ₓ” and “(Y)_{y}” within the plurality of amplicons are sequence alignment anchors.

[0099] In some embodiments, the random sequence within a unique tag sequence is represented by “N”, and the fixed sequence is represented by “X”. Thus, a unique tag sequence is represented by N₁N₂N₃X₁X₂X₃ or by N₁N₂N₃X₁X₂X₃N₄N₅N₆X₄X₅X₆. Optionally, a unique tag sequence can have a random sequence in which some or all of the nucleotide positions are randomly selected from a group consisting of A, G, C, T, U and I. For example, a nucleotide for each position within a random sequence is independently selected from any one of A, G, C, T, U or I, or is selected from a subset of these six different types of nucleotides. Optionally, a nucleotide for each position within a random sequence is independently selected from any one of A, G, C or T. In some embodiments, the first fixed tag sequence “X₁X₂X₃” is the same or different sequence in a plurality of tags. In some embodiments, the second fixed tag sequence “X₄X₅X₆” is the same or different sequence in a plurality of tags. In some embodiments, the first fixed tag sequence “X₁X₂X₃” and the second fixed tag sequence “X₄X₅X₆” within the plurality of amplicons are sequence alignment anchors.

[0100] In some embodiments, a unique tag sequence comprises the sequence 5′-NNNACTNNNTGA-3′, where “N” represents a position within the random sequence that is generated randomly from A, G, C or T, the number of possible distinct random tags is calculated to be 4⁶ (or 4\hat{ }6) is about 4096, and the number of possible different combinations of two unique tags is 4¹² (or 4\hat{ }12) is about 16.78 million. In some embodiments, the underlined portions of 5′-NNNACTNNNTGA-3′ are a sequence alignment anchor.

[0101] In some embodiments, the fixed sequences within the unique tag sequence is a sequence alignment anchor that can be used to generate error-corrected sequencing data. In some embodiments fixed sequences within the unique tag sequence is a sequence alignment anchor that can be used to generate a family of error-corrected sequencing reads.

### Kits, Systems

[0102] Further provided herein are kits for use in preparing libraries of target nucleic acids using methods of the first or second aspects of the invention. Embodiments of a kit comprise a supply of at least a pair of target specific adaptors as defined herein which are capable of producing a first amplification product; as well as optionally a supply of at least one universal pair of amplification primers capable of annealing to the universal handle(s) of the adaptor and priming synthesis of an amplification product, which amplification product would include a target sequence of interest ligated to a universal sequence. Adaptors and/or primers may be supplied in kits ready for use, or more preferably as concentrates requiring dilution before use, or even in a lyophilized or dried form requiring reconstitution prior to use. In certain embodiments kits further include a supply of a suitable diluent for dilution or reconstitution of the components. Optionally, kits further comprise supplies of reagents, buffers, enzymes, dNTPs, etc., for use in carrying out amplification, digestion, repair, and/or purification in the generation of library as provided herein. Non-limiting examples of such reagents are as described in the Materials and Methods sections of the accompanying Exemplification. Further components which optionally are supplied in the kit include components suitable for purification of libraries prepared using the provided methods. In some embodiments, provided is a kit for generating a target-specific library comprising a plurality of target-specific adaptors having a 5′ universal handle sequence, a 3′ target specific sequence and a cleavable group, a DNA polymerase, an adaptor, dATP, dCTP, dGTP, dTTP, and a digestion reagent. In some embodiments, the kit further comprises one or more antibodies, a repair reagent, universal primers optionally comprising nucleic acid barcodes, purification solutions or columns.

[0103] Particular features of adaptors for inclusion in kits are as described elsewhere herein in relation to other aspects of the invention. The structure and properties of universal amplification primers are well known to those skilled in the art and can be implemented for utilization in conjunction with provided methods and compositions to adapt to specific analysis platforms (e.g., as described herein universal P1 and A primers have been described in the art and utilized for sequencing on Ion Torrent sequencing platforms). Similarly, additional and other universal adaptor/primer sequences described and known in the art (e.g., Illumina universal adaptor/primer sequences, PacBio universal adaptor/primer sequences, etc.) can be used in conjunction with the methods and compositions provided herein. Suitable primers of appropriate nucleotide sequence for use with adaptors included in the kit is readily prepared using standard automated nucleic acid synthesis equipment and reagents in routine use in the art. A kit may include a supply of one single type of universal primer or separate types (or even a mixture) of two different universal primers, for example a pair of amplification primers suitable for amplification of templates modified with adaptors in a first amplification. A kit may comprise at least a pair of adaptors for first amplification of a sample of interest according to the methods of the invention, plus at least two different amplification primers that optionally carry a different tag (barcode) sequence, where the tag (barcode) sequence does not hybridize to the adaptor. A kit can be used to amplify at least two different samples where each sample is amplified according to methods of the invention separately and a second amplification comprises using a single universal primer having a barcode, and then pooling prepared sample libraries after library preparations. In some embodiments a kit includes different universal primer-pairs for use in second amplification step described herein. In this context the ‘universal’ primer-pairs may be of substantially identical nucleotide sequence but differ with respect to some other feature or modification.

[0104] Further provided are systems, e.g., systems used to practice methods provided herein, and/or comprising compositions provided herein. In some embodiments, systems facilitate methods carried out in automated mode. In certain embodiments, systems facilitate high throughput mode. In certain embodiments, systems include, e.g., a fluid handling element, a fluid containing element, a heat source and/or heat sink for achieving and maintaining a desired reaction temperature, and/or a robotic element capable of moving components of the system from place to place as needed (e.g., a multiwell plate handling element).

### Samples

[0105] As defined herein, “sample” and its derivatives, is used in its broadest sense and includes any specimen, culture and/or the like that is suspected of including a target nucleic acid. In some embodiments, a sample comprises DNA, RNA, chimeric nucleic acid, hybrid nucleic acid, multiplex-forms of nucleic acids or any combination of two or more of the foregoing. In some embodiments a sample useful in conjunction with methods of the invention includes any biological, clinical, surgical, agricultural, atmospheric or aquatic-based specimen containing one or more target nucleic acid of interest. In some embodiments, a sample includes nucleic acid molecules obtained from an animal such as a human or mammalian source. In another embodiment, a sample includes nucleic acid molecules obtained from a non-mammalian source such as a plant, bacteria, virus or fungus. In some embodiments, the source of the nucleic acid molecules may be an archived or extinct sample or species. In some embodiments a sample includes isolated nucleic acid sample prepared, for example, from a source such as genomic DNA, RNA or a prepared sample such as, e.g., fresh-frozen or formalin-fixed paraffin-embedded (FFPE) nucleic acid specimen. It is also envisioned that a sample is from a single individual, a collection of nucleic acid samples from genetically related members, multiple nucleic acid samples from genetically unrelated members, multiple nucleic acid samples (matched) from a single individual such as a tumor sample and normal tissue sample, or genetic material from a single source that contains two distinct forms of genetic material such as maternal and fetal DNA obtained from a maternal subject, or the presence of contaminating bacteria DNA in a sample that contains plant or animal DNA. In some embodiments, a source of nucleic acid material includes nucleic acids obtained from a newborn (e.g., a blood sample for newborn screening). In some embodiments, provided methods comprise amplification of multiple target-specific sequences from a single nucleic acid sample. In some embodiments, provided methods comprise target-specific amplification of two or more target sequences from two or more nucleic acid samples or species. In certain embodiments, provided methods comprise amplification of highly multiplexed target nucleic acid sequences from a single sample. In particular embodiments, provided methods comprise amplification of highly multiplexed target nucleic acid sequences from more than one sample, each from the same source organism.

[0106] In some embodiments a sample comprises a mixture of target nucleic acids and non-target nucleic acids. In certain embodiments a sample comprises a plurality of initial polynucleotides which comprises a mixture of one or more target nucleic acids and may include one or more non-target nucleic acids. In some embodiments a sample comprising a plurality of polynucleotides comprises a portion or aliquot of an originating sample; in some embodiments, a sample comprises a plurality of polynucleotides which is the entire originating sample. In some embodiments a sample comprises a plurality of initial polynucleotides is isolated from the same source or from the same subject at different time points.

[0107] In some embodiments, a nucleic acid sample includes cell-free nucleic acids from a biological fluid, nucleic acids from a tissue, nucleic acids from a biopsied tissue, nucleic acids from a needle biopsy, nucleic acids from a single cell or nucleic acids from two or more cells. In certain embodiments, a single reaction mixture contains 1-100 ng of the plurality of initial polynucleotides. In some embodiments a plurality of initial polynucleotides comprises a formalin fixed paraffin-embedded (FFPE) sample; genomic DNA; RNA; cell free DNA or RNA; circulating tumor DNA or RNA; fresh frozen sample, or a mixture of two or more of the foregoing; and in some embodiments a the plurality of initial polynucleotides comprises a nucleic acid reference standard. In some embodiments, a sample includes nucleic acid molecules obtained from biopsies, tumors, scrapings, swabs, blood, mucus, urine, plasma, semen, hair, laser capture micro-dissections, surgical resections, and other clinical or laboratory obtained sample. In some embodiments, a sample is an epidemiological, agricultural, forensic or pathogenic sample. In certain embodiments, a sample includes a reference. In some embodiments a sample is a normal tissue or well documented tumor sample. In certain embodiments a reference is a standard nucleic acid sequence (e.g., Hg19).

### Target Nucleic Acid Sequence Analysis

[0108] Provided methods and compositions of the invention are particularly suitable for amplifying, optionally tagging, and preparing target sequences for subsequent analysis. Thus, in some embodiments, methods provided herein include analyzing resulting library preparations. For example, methods comprise analysis of a polynucleotide sequence of a target nucleic acid, and, where applicable, analysis of any tag sequence(s) added to a target nucleic acid. In some embodiments wherein multiple target nucleic acid regions are amplified, provided methods include determining polynucleotide sequences of multiple target nucleic acids. Provided methods further optionally include using a second tag sequence(s), e.g., barcode sequence, to identify the source of the target sequence (or to provide other information about the sample source). In certain embodiments, use of prepared library composition is provided for analysis of the sequences of the nucleic acid library.

[0109] In particular embodiments, use of prepared tagged library compositions is provided for further analyzing the sequences of the target nucleic acid library. In some embodiments determination of sequences comprises determining the abundance of at least one of the target sequences in the sample. In some embodiments determination of a low frequency allele in a sample is comprised in determination of sequences of a nucleic acid library. In certain embodiments, determination of the presence of a mutant target nucleic acid in the plurality of polynucleotides is comprised in determination of sequences of a nucleic acid library. In some embodiments, determination of the presence of a mutant target nucleic acid comprises detecting the abundance level of at least one mutant target nucleic acid in the plurality of polynucleotides. For example, such determination comprises detecting at least one mutant target nucleic acid is present at 0.05% to 1% of the original plurality of polynucleotides in the sample, detecting at least one mutant target nucleic acid is present at about 1% to about 5% of the polynucleotides in the sample, and/or detecting at least 85%-100% of target nucleic acids in sample. In some embodiments, determination of the presence of a mutant target nucleic acid comprises detecting and identification of copy number variation and/or genetic fusion sequences in a sample.

[0110] In some embodiments, nucleic acid sequencing of the amplified target sequences produced by the teachings of this disclosure include de novo sequencing or targeted re-sequencing. In some embodiments, nucleic acid sequencing further includes comparing the nucleic acid sequencing results of the amplified target sequences against a reference nucleic acid sequence. In some embodiments, nucleic acid sequencing of the target library sequences further includes determining the presence or absence of a mutation within a nucleic acid sequence. In some embodiments, nucleic acid sequencing includes the identification of genetic markers associated with disease (e.g., cancer and/or inherited disease).

[0111] In some embodiments, prepared library of target sequences of the disclosed methods is used in various downstream analysis or assays with, or without, further purification or manipulation. In some embodiments analysis comprises sequencing by traditional sequencing reactions, high throughput next generation sequencing, targeted multiplex array sequence detection, or any combination of two or more of the foregoing. In certain embodiments analysis is carried out by high throughput next generation sequencing. In particular embodiments sequencing is carried out in a bidirectional manner, thereby generating sequence reads in both forward and reverse strands for any given amplicon.

[0112] In some embodiments, library prepared according to the methods provided herein is then further manipulated for additional analysis. For example, prepared library sequences is used in downstream enrichment techniques known in the art, such a bridge amplification or emPCR to generate a template library that is then used in next generation sequencing. In some embodiments, the target nucleic acid library is used in an enrichment application and a sequencing application. For example, sequence determination of a provided target nucleic acid library is accomplished using any suitable DNA sequencing platform. In some embodiments, the library sequences of the disclosed methods or subsequently prepared template libraries is used for single nucleotide polymorphism (SNP) analysis, genotyping or epigenetic analysis, copy number variation analysis, gene expression analysis, analysis of gene mutations including but not limited to detection, prognosis and/or diagnosis, detection and analysis of rare or low frequency allele mutations, nucleic acid sequencing including but not limited to de novo sequencing, targeted resequencing and synthetic assembly analysis. In one embodiment, prepared library sequences are used to detect mutations at less than 5% allele frequency. In some embodiments, the methods disclosed herein is used to detect mutations in a population of nucleic acids at less than 4%, 3%, 2% or at about 1% allele frequency. In another embodiment, libraries prepared as described herein are sequenced to detect and/or identify germline or somatic mutations from a population of nucleic acid molecules. In certain embodiments, sequencing adaptors are ligated to the ends of the prepared libraries generate a plurality of libraries suitable for nucleic acid sequencing.

[0113] In some embodiments, methods for preparing a target-specific amplicon library are provided for use in a variety of downstream processes or assays such as nucleic acid sequencing or clonal amplification. In some embodiments, the library is amplified using bridge amplification or emPCR to generate a plurality of clonal templates suitable for nucleic acid sequencing. For example, optionally following target-specific amplification a secondary and/or tertiary amplification process including, but not limited to, a library amplification step and/or a clonal amplification step is performed. “Clonal amplification” refers to the generation of many copies of an individual molecule. Various methods known in the art is used for clonal amplification. For example, emulsion PCR is one method, and involves isolating individual DNA molecules along with primer-coated beads in aqueous bubbles within an oil phase. A polymerase chain reaction (PCR) then coats each bead with clonal copies of the isolated library molecule and these beads are subsequently immobilized for later sequencing. Emulsion PCR is used in the methods published by Marguilis et al. and Shendure and Porreca et al. (also known as “polony sequencing”, commercialized by Agencourt and recently acquired by Applied Biosystems). Margulies, et al. (2005) Nature 437: 376-380; Shendure et al., Science 309 (5741): 1728-1732. Another method for clonal amplification is “bridge PCR,” where fragments are amplified upon primers attached to a solid surface. These methods, as well as other methods of clonal amplification, both produce many physically isolated locations that each contain many copies derived from a single molecule polynucleotide fragment. Thus, in some embodiments, the one or more target specific amplicons are amplified using for example, bridge amplification or emPCR to generate a plurality of clonal templates suitable for nucleic acid sequencing.

[0114] In some embodiments, at least one of the library sequences to be clonally amplified are attached to a support or particle. A support can be comprised of any suitable material and have any suitable shape, including, for example, planar, spheroid or particulate. In some embodiments, the support is a scaffolded polymer particle as described in U.S. Published App. No. 20100304982, hereby incorporated by reference in its entirety. In certain embodiments methods comprise depositing at least a portion of an enriched population of library sequences onto a support (e.g., a sequencing support), wherein the support comprises an array of sequencing reaction sites. In some embodiments, an enriched population of library sequences are attached to the sequencing reaction sites on the support. wherein the support comprises an array of 10²-10¹⁰ sequencing reaction sites.

[0115] Sequence determination means determination of information relating to the sequence of a nucleic acid and may include identification or determination of partial as well as full sequence information of the nucleic acid. Sequence information may be determined with varying degrees of statistical reliability or confidence. In some embodiments sequence analysis includes high throughput, low depth detection such as by qPCR, rtPCR, and/or array hybridization detection methodologies known in the art. In some embodiments, sequencing analysis includes the determination of the in depth sequence assessment, such as by Sanger sequencing or other high throughput next generation sequencing methods. Next-generation sequencing means sequence determination using methods that determine many (typically thousands to billions) nucleic acid sequences in an intrinsically massively parallel manner, e.g. where many sequences are read out, e.g., in parallel, or alternatively using an ultra-high throughput serial process that itself may be parallelized. Thus, in certain embodiments, methods of the invention include sequencing analysis comprising massively parallel sequencing. Such methods include but are not limited to pyrosequencing (for example, as commercialized by 454 Life Sciences, Inc., Branford, Conn.); sequencing by ligation (for example, as commercialized in the SOLiD™. technology, Life Technologies, Inc., Carlsbad, Calif); sequencing by synthesis using modified nucleotides (such as commercialized in TruSeq™ and HiSeg™. technology by Illumina, Inc., San Diego, Calif; HeliScope™ by Helicos Biosciences Corporation, Cambridge, Mass.; and PacBio Sequel® or RS systems by Pacific Biosciences of California, Inc., Menlo Park, Calif.), sequencing by ion detection technologies (e.g., Ion Torrent™ technology, Life Technologies, Carlsbad, Calif); sequencing of DNA nanoballs (Complete Genomics, Inc., Mountain View, Calif.); nanopore-based sequencing technologies (for example, as developed by Oxford Nanopore Technologies, LTD, Oxford, UK), and like highly parallelized sequencing methods.

[0116] For example, in certain embodiments, libraries produced by the teachings of the present disclosure are sufficient in yield to be used in a variety of downstream applications including the Ion Xpress™ Template Kit using an Ion Torrent™ PGM system (e.g., PCR-mediated addition of the nucleic acid fragment library onto Ion Sphere™ Particles)(Life Technologies, Part No. 4467389) or Ion Torrent Proton™ system). For example, instructions to prepare a template library from the amplicon library can be found in the Ion Xpress Template Kit User Guide (Life Technologies, Part No. 4465884), hereby incorporated by reference in its entirety. Instructions for loading the subsequent template library onto the Ion Torrent™ Chip for nucleic acid sequencing are described in the Ion Sequencing User Guide (Part No. 4467391), hereby incorporated by reference in its entirety. Similarly, sequencing using other platforms (e.g., PacBio, Illumina, Helicos, Complete Genomics, Oxford Nanopore) may be carried out using adapted methodologies to incorporate the relevant template preparation according to the instructions and guidance provided with each of the respective platforms.

[0117] The initiation point for the sequencing reaction may be provided by annealing a sequencing primer to a product of a solid-phase amplification reaction. In this regard, one or both of the adaptors added during formation of template library may include a nucleotide sequence which permits annealing of a sequencing primer to amplified products derived by whole genome or solid-phase amplification of the template library. Depending on implementation of an embodiment of the invention, a tag sequence and/or target nucleic acid sequence may be determined in a single read from a single sequencing primer, or in multiple reads from two different sequencing primers. In the case of two reads from two sequencing primers, a ‘tag read’ and a ‘target sequence read’ are performed in either order, with a suitable denaturing step to remove an annealed primer after the first sequencing read is completed.

[0118] In some embodiments, a sequencer is coupled to server that applies parameters or software to determine the sequence of the amplified target nucleic acid molecules. In certain embodiments, the sequencer is coupled to a server that applies parameters or software to determine the presence of a low frequency mutation allele present in a sample.

### EMBODIMENTS

[0119] In one embodiment, a method for preparing a library of target nucleic acid sequences is provided comprising contacting a nucleic acid sample with a plurality of adaptors capable of amplification of one or more target nucleic acid sequences in the sample under conditions wherein the target nucleic acid(s) undergo a first amplification; digesting resulting first amplification products to reduce or eliminate resulting primer dimers and prepare partially digested target amplicons, producing gapped, double stranded amplicons, then repairing the partially digested target amplicons; and amplifying the repaired target amplicons in a second amplification using universal primers, wherein each of the plurality of adaptors comprise a universal handle sequence and a target nucleic acid sequence and a cleavable moiety, wherein at least two and up to one hundred thousand target specific adaptor pairs are included, and wherein the target nucleic acid sequence of the adaptor includes at least one cleavable moiety and the universal handle sequence does not include the cleavable moiety. Optionally one or more tag sequences are comprised in each of the plurality of adaptors. Such methods thereby produce a library of target nucleic acid sequence. In some embodiments, the digestion and repair is carried out in a single step. In particular embodiments the plurality of gapped polynucleotide products in digestion are contacted with the digestion and repair reagents simultaneously. In other embodiments the digestion and repair step is carried out in a temporally separate manner at different temperatures. In particular embodiments the plurality of gapped polynucleotide products in digestion are contacted sequentially with the digestion and repair reagents. In some embodiments one or more of the method steps is conducted in manual mode or in an automated mode or a combination thereof. In particular embodiments each of the method steps is carried out in automated mode. In some embodiments the foregoing methods further comprise at least one purification step. In particular embodiments a purification step is carried out only after the second universal amplification step. In other particular embodiments a purification is carried out after the digestion and repair step and an additional purification is carried out after the second universal amplification. In some of the embodiments adaptor-dimer by products resulting from the first amplification are removed from the resulting library, and in some embodiments an enriched population of amplified target nucleic acids contains a reduced amount of adaptor-dimer byproduct. In certain embodiments, adaptor-dimer byproducts are eliminated. In the foregoing methods the plurality of adaptors capable of amplification of one or more target nucleic acid sequences comprises a multiplex of adaptor pairs capable of amplification of at least two different target nucleic acid sequences. In some embodiments, each target specific pair of the plurality of adaptors includes up to 16,777,216 different adaptor combinations comprising different tag sequences. In certain embodiments each generated target specific amplicon sequence includes at least 1 different sequence and up to 107 different sequences. In some embodiments, the foregoing methods further comprise analyzing the sequence of the resulting library of target nucleic acid sequences. Such analyzing comprises sequencing by traditional sequencing reactions, high throughput next generation sequencing, targeted multiplex array sequence detection, or any combination of two or more of the foregoing. In other embodiments, the foregoing methods further comprise determining the abundance of at least one of the target nucleic acid sequences in the sample. Such determining is carried out by high throughput next generation sequencing in certain embodiments. In particular embodiments, such sequencing is carried out in a bidirectional manner, thereby generating sequence reads in both forward and reverse strands for any given amplicon. In some embodiments the foregoing methods comprise digestion reagent selected from any one or a combination of uracil DNA glycosylase (UDG), apurinic endonuclease (e.g., APE1), RecJf, formamidopyrimidine [fapy]-DNA glycosylase (fpg), Nth endonuclease III, endonuclease VIII, polynucleotide kinase (PNK), Taq DNA polymerase, DNA polymerase I and/or human DNA polymerase beta. In some embodiments, the foregoing methods comprise repair reagent selected from any one or a combination of Phusion DNA polymerase, Phusion U DNA polymerase, SuperFi DNA polymerase, Taq DNA polymerase, Human DNA polymerase beta, T4 DNA polymerase and/or T7 DNA polymerase, SuperFiU DNA polymerase, E. coli DNA ligase, T3 DNA ligase, T4 DNA ligase, T7 DNA ligase, Taq DNA ligase, and/or 9° N DNA ligase. In particular embodiments the foregoing methods comprise digestion and repair reagent selected from any one or a combination of uracil DNA glycosylase (UDG), apurinic endonuclease (e.g., APE1), Taq DNA polymerase, Phusion U DNA polymerase, SuperFiU DNA polymerase, 7 DNA ligase. In more particular embodiments the foregoing methods comprise digestion and repair reagent selected from any one or a combination of uracil DNA glycosylase (UDG), formamidopyrimidine [fapy]-DNA glycosylase (fpg), Phusion U DNA polymerase, Taq DNA polymerase, SuperFiU DNA polymerase, T4 PNK and T7 DNA ligase. In preferred embodiments, the foregoing methods generate compositions comprising nucleic acid library. In particularly preferred embodiments, generated compositions comprising nucleic acid library are useful for analysis of sequences. In specific embodiments, use comprises determination of low frequency allele(s) in a sample.

[0120] In one embodiment, a method for preparing a library of target nucleic acid sequences is provided comprising contacting a nucleic acid sample with a plurality of adaptors capable of amplification of one or more target nucleic acid sequences in the sample under conditions wherein the target nucleic acid(s) undergo a first amplification; digesting resulting first amplification products to reduce or eliminate resulting primer dimers and prepare partially digested target amplicons, producing gapped, double stranded amplicons, then repairing the partially digested target amplicons; and amplifying the repaired target amplicons in a second amplification using universal primers, wherein each of the plurality of adaptors comprise a universal handle sequence and a target nucleic acid sequence and a cleavable moiety and a tag sequence is included in at least one adaptor, and the cleavable moieties are included flanking either end of the tag sequence, wherein at least two and up to one hundred thousand target specific adaptor pairs are included, and wherein the target nucleic acid sequence of the adaptor includes at least one cleavable moiety and the universal handle sequence does not include the cleavable moiety. Such methods thereby produce a library of target nucleic acid sequence. In some embodiments, the digestion and repair is carried out in a single step. In particular embodiments the plurality of gapped polynucleotide products in digestion are contacted with the digestion and repair reagents simultaneously. In other embodiments the digestion and repair step is carried out in a temporally separate manner at different temperatures. In particular embodiments the plurality of gapped polynucleotide products in digestion are contacted sequentially with the digestion and repair reagents. In some embodiments one or more of the method steps is conducted in manual mode or in an automated mode or a combination thereof. In particular embodiments each of the method steps is carried out in automated mode. In some embodiments the foregoing methods further comprise at least one purification step. In particular embodiments a purification step is carried out only after the second universal amplification step. In other particular embodiments a purification is carried out after the digestion and repair step and an additional purification is carried out after the second universal amplification. In some of the embodiments adaptor-dimer by products resulting from the first amplification are removed from the resulting library, and in some embodiments an enriched population of amplified target nucleic acids contains a reduced amount of adaptor-dimer byproduct. In certain embodiments, adaptor-dimer byproducts are eliminated. In the foregoing methods the plurality of adaptors capable of amplification of one or more target nucleic acid sequences comprises a multiplex of adaptor pairs capable of amplification of at least two different target nucleic acid sequences. In some embodiments, each target specific pair of the plurality of adaptors includes up to 16,777,216 different adaptor combinations comprising different tag sequences. In certain embodiments each generated target specific amplicon sequence includes at least 1 different sequence and up to 107 different sequences. In some embodiments, the foregoing methods further comprise analyzing the sequence of the resulting library of target nucleic acid sequences. Such analyzing comprises sequencing by traditional sequencing reactions, high throughput next generation sequencing, targeted multiplex array sequence detection, or any combination of two or more of the foregoing. In other embodiments, the foregoing methods further comprise determining the abundance of at least one of the target nucleic acid sequences in the sample. Such determining is carried out by high throughput next generation sequencing in certain embodiments. In particular embodiments, such sequencing is carried out in a bidirectional manner, thereby generating sequence reads in both forward and reverse strands for any given amplicon. In some embodiments the foregoing methods comprise digestion reagent selected from any one or a combination of uracil DNA glycosylase (UDG), apurinic endonuclease (e.g., APE1), RecJf, formamidopyrimidine [fapy]-DNA glycosylase (fpg), Nth endonuclease III, endonuclease VIII, polynucleotide kinase (PNK), Taq DNA polymerase, DNA polymerase I and/or human DNA polymerase beta. In some embodiments, the foregoing methods comprise repair reagent selected from any one or a combination of Phusion DNA polymerase, Phusion U DNA polymerase, SuperFi DNA polymerase, Taq DNA polymerase, Human DNA polymerase beta, T4 DNA polymerase and/or T7 DNA polymerase, SuperFiU DNA polymerase, E. coli DNA ligase, T3 DNA ligase, T4 DNA ligase, T7 DNA ligase, Taq DNA ligase, and/or 9° N DNA ligase. In particular embodiments the foregoing methods comprise digestion and repair reagent selected from any one or a combination of uracil DNA glycosylase (UDG), apurinic endonuclease (e.g., APE1), Taq DNA polymerase, Phusion U DNA polymerase, SuperFiU DNA polymerase, 7 DNA ligase. In more particular embodiments the foregoing methods comprise digestion and repair reagent selected from any one or a combination of uracil DNA glycosylase (UDG), formamidopyrimidine [fapy]-DNA glycosylase (fpg), Phusion U DNA polymerase, Taq DNA polymerase, SuperFiU DNA polymerase, T4 PNK and T7 DNA ligase. In preferred embodiments, the foregoing methods generate compositions comprising nucleic acid library. In particularly preferred embodiments, generated compositions comprising nucleic acid library are useful for analysis of sequences. In specific embodiments, use comprises determination of low frequency allele(s) in a sample.

[0121] In one embodiment, a method for preparing a library of target nucleic acid sequences is provided comprising contacting a nucleic acid sample with a plurality of adaptors capable of amplification of one or more target nucleic acid sequences in the sample under conditions wherein the target nucleic acid(s) undergo a first amplification; digesting resulting first amplification products to reduce or eliminate resulting primer dimers and prepare partially digested target amplicons, producing gapped, double stranded amplicons, then repairing the partially digested target amplicons; and amplifying the repaired target amplicons in a second amplification using universal primers, wherein each of the plurality of adaptors comprise a universal handle sequence and a target nucleic acid sequence and a cleavable moiety, wherein at least two and up to one hundred thousand target specific adaptor pairs are included, and wherein the target nucleic acid sequence of the adaptor includes at least one cleavable moiety and the universal handle sequence does not include the cleavable moiety and the melting temperature of each universal sequence is higher than the melting temperature of each target nucleic acid sequence and each tag sequence present. Optionally one or more tag sequences are comprised in each of the plurality of adaptors. Such methods thereby produce a library of target nucleic acid sequence. In some embodiments, the digestion and repair is carried out in a single step. In particular embodiments the plurality of gapped polynucleotide products in digestion are contacted with the digestion and repair reagents simultaneously. In other embodiments the digestion and repair step is carried out in a temporally separate manner at different temperatures. In particular embodiments the plurality of gapped polynucleotide products in digestion are contacted sequentially with the digestion and repair reagents. In some embodiments one or more of the method steps is conducted in manual mode or in an automated mode or a combination thereof. In particular embodiments each of the method steps is carried out in automated mode. In some embodiments the foregoing methods further comprise at least one purification step. In particular embodiments a purification step is carried out only after the second universal amplification step. In other particular embodiments a purification is carried out after the digestion and repair step and an additional purification is carried out after the second universal amplification. In some of the embodiments adaptor-dimer by products resulting from the first amplification are removed from the resulting library, and in some embodiments an enriched population of amplified target nucleic acids contains a reduced amount of adaptor-dimer byproduct. In certain embodiments, adaptor-dimer byproducts are eliminated. In the foregoing methods the plurality of adaptors capable of amplification of one or more target nucleic acid sequences comprises a multiplex of adaptor pairs capable of amplification of at least two different target nucleic acid sequences. In some embodiments, each target specific pair of the plurality of adaptors includes up to 16,777,216 different adaptor combinations comprising different tag sequences. In certain embodiments each generated target specific amplicon sequence includes at least 1 different sequence and up to 107 different sequences. In some embodiments, the foregoing methods further comprise analyzing the sequence of the resulting library of target nucleic acid sequences. Such analyzing comprises sequencing by traditional sequencing reactions, high throughput next generation sequencing, targeted multiplex array sequence detection, or any combination of two or more of the foregoing. In other embodiments, the foregoing methods further comprise determining the abundance of at least one of the target nucleic acid sequences in the sample. Such determining is carried out by high throughput throughput next generation sequencing in certain embodiments. In particular embodiments, such sequencing is carried out in a bidirectional manner, thereby generating sequence reads in both forward and reverse strands for any given amplicon. In some embodiments the foregoing methods comprise digestion reagent selected from any one or a combination of uracil DNA glycosylase (UDG), apurinic endonuclease (e.g., APE1), RecJf, formamidopyrimidine [fapy]-DNA glycosylase (fpg), Nth endonuclease III, endonuclease VIII, polynucleotide kinase (PNK), Taq DNA polymerase, DNA polymerase I and/or human DNA polymerase beta. In some embodiments, the foregoing methods comprise repair reagent selected from any one or a combination of Phusion DNA polymerase, Phusion U DNA polymerase, SuperFi DNA polymerase, Taq DNA polymerase, Human DNA polymerase beta, T4 DNA polymerase and/or T7 DNA polymerase, SuperFiU DNA polymerase, E. coli DNA ligase, T3 DNA ligase, T4 DNA ligase, T7 DNA ligase, Taq DNA ligase, and/or 9° N DNA ligase. In particular embodiments the foregoing methods comprise digestion and repair reagent selected from any one or a combination of uracil DNA glycosylase (UDG), apurinic endonuclease (e.g., APE1), Taq DNA polymerase, Phusion U DNA polymerase, SuperFiU DNA polymerase, 7 DNA ligase. In more particular embodiments the foregoing methods comprise digestion and repair reagent selected from any one or a combination of uracil DNA glycosylase (UDG), formamidopyrimidine [fapy]-DNA glycosylase (fpg), Phusion U DNA polymerase, Taq DNA polymerase, SuperFiU DNA polymerase, T4 PNK and T7 DNA ligase. In preferred embodiments, the foregoing methods generate compositions comprising nucleic acid library. In particularly preferred embodiments, generated compositions comprising nucleic acid library are useful for analysis of sequences. In specific embodiments, use comprises determination of low frequency allele(s) in a sample.

[0122] In one embodiment, a method for preparing a library of target nucleic acid sequences is provided comprising contacting a nucleic acid sample with a plurality of adaptors capable of amplification of one or more target nucleic acid sequences in the sample under conditions wherein the target nucleic acid(s) undergo a first amplification; digesting resulting first amplification products to reduce or eliminate resulting primer dimers and prepare partially digested target amplicons, producing gapped, double stranded amplicons, then repairing the partially digested target amplicons; and amplifying the repaired target amplicons in a second amplification using universal primers, wherein each of the plurality of adaptors comprise a universal handle sequence and a target nucleic acid sequence and a cleavable moiety, wherein at least two and up to one hundred thousand target specific adaptor pairs are included, and wherein the target nucleic acid sequence of the adaptor includes at least one cleavable moiety and the universal handle sequence does not include the cleavable moiety. Optionally one or more tag sequences are comprised in each of the plurality of adaptors. Such methods are carried out in a single, addition only workflow reaction, allowing for rapid production of highly multiplexed targeted libraries thereby produce a library of target nucleic acid sequence. In some embodiments, the digestion and repair is carried out in a single step. In particular embodiments the plurality of gapped polynucleotide products in digestion are contacted with the digestion and repair reagents simultaneously. In other embodiments the digestion and repair step is carried out in a temporally separate manner at different temperatures. In particular embodiments the plurality of gapped polynucleotide products in digestion are contacted sequentially with the digestion and repair reagents. In some embodiments one or more of the method steps is conducted in manual mode or in an automated mode or a combination thereof. In particular embodiments each of the method steps is carried out in automated mode. In some embodiments the foregoing methods further comprise at least one purification step. In particular embodiments a purification step is carried out only after the second universal amplification step. In other particular embodiments a purification is carried out after the digestion and repair step and an additional purification is carried out after the second universal amplification. In some of the embodiments adaptor-dimer by products resulting from the first amplification are removed from the resulting library, and in some embodiments an enriched population of amplified target nucleic acids contains a reduced amount of adaptor-dimer byproduct. In certain embodiments, adaptor-dimer byproducts are eliminated. In the foregoing methods the plurality of adaptors capable of amplification of one or more target nucleic acid sequences comprises a multiplex of adaptor pairs capable of amplification of at least two different target nucleic acid sequences. In some embodiments, each target specific pair of the plurality of adaptors includes up to 16,777,216 different adaptor combinations comprising different tag sequences. In certain embodiments each generated target specific amplicon sequence includes at least 1 different sequence and up to 107 different sequences. In some embodiments, the foregoing methods further comprise analyzing the sequence of the resulting library of target nucleic acid sequences. Such analyzing comprises sequencing by traditional sequencing reactions, high throughput next generation sequencing, targeted multiplex array sequence detection, or any combination of two or more of the foregoing. In other embodiments, the foregoing methods further comprise determining the abundance of at least one of the target nucleic acid sequences in the sample. Such determining is carried out by high throughput next generation sequencing in certain embodiments. In particular embodiments, such sequencing is carried out in a bidirectional manner, thereby generating sequence reads in both forward and reverse strands for any given amplicon. In some embodiments the foregoing methods comprise digestion reagent selected from any one or a combination of uracil DNA glycosylase (UDG), apurinic endonuclease (e.g., APE1), RecJf, formamidopyrimidine [fapy]-DNA glycosylase (fpg), Nth endonuclease III, endonuclease VIII, polynucleotide kinase (PNK), Taq DNA polymerase, DNA polymerase I and/or human DNA polymerase beta. In some embodiments, the foregoing methods comprise repair reagent selected from any one or a combination of Phusion DNA polymerase, Phusion U DNA polymerase, SuperFi DNA polymerase, Taq DNA polymerase, Human DNA polymerase beta, T4 DNA polymerase and/or T7 DNA polymerase, SuperFiU DNA polymerase, E. coli DNA ligase, T3 DNA ligase, T4 DNA ligase, T7 DNA ligase, Taq DNA ligase, and/or 9° N DNA ligase. In particular embodiments the foregoing methods comprise digestion and repair reagent selected from any one or a combination of uracil DNA glycosylase (UDG), apurinic endonuclease (e.g., APE1), Taq DNA polymerase, Phusion U DNA polymerase, SuperFiU DNA polymerase, 7 DNA ligase. In more particular embodiments the foregoing methods comprise digestion and repair reagent selected from any one or a combination of uracil DNA glycosylase (UDG), formamidopyrimidine [fapy]-DNA glycosylase (fpg), Phusion U DNA polymerase, Taq DNA polymerase, SuperFiU DNA polymerase, T4 PNK and T7 DNA ligase. In preferred embodiments, the foregoing methods generate compositions comprising nucleic acid library. In particularly preferred embodiments, generated compositions comprising nucleic acid library are useful for analysis of sequences. In specific embodiments, use comprises determination of low frequency allele(s) in a sample.

[0123] In one embodiment, a method for preparing a library of target nucleic acid sequences is provided comprising contacting a nucleic acid sample with a plurality of adaptors capable of amplification of one or more target nucleic acid sequences in the sample under conditions wherein the target nucleic acid(s) undergo a first amplification; digesting resulting first amplification products to reduce or eliminate resulting primer dimers and prepare partially digested target amplicons, producing gapped, double stranded amplicons, then repairing the partially digested target amplicons; and amplifying the repaired target amplicons in a second amplification using universal primers, wherein each of the plurality of adaptors comprise a universal handle sequence and a target nucleic acid sequence and a cleavable moiety and all of the adaptors comprise tag sequences having cleavable groups flanking either end of the tag sequence, wherein at least two and up to one hundred thousand target specific adaptor pairs are included, and wherein the target nucleic acid sequence of the adaptor includes at least one cleavable moiety and the universal handle sequence does not include the cleavable moiety. Such methods thereby produce a library of target nucleic acid sequence. In some embodiments, the digestion and repair is carried out in a single step. In particular embodiments the plurality of gapped polynucleotide products in digestion are contacted with the digestion and repair reagents simultaneously. In other embodiments the digestion and repair step is carried out in a temporally separate manner at different temperatures. In particular embodiments the plurality of gapped polynucleotide products in digestion are contacted sequentially with the digestion and repair reagents. In some embodiments one or more of the method steps is conducted in manual mode or in an automated mode or a combination thereof. In particular embodiments each of the method steps is carried out in automated mode. In some embodiments the foregoing methods further comprise at least one purification step. In particular embodiments a purification step is carried out only after the second universal amplification step. In other particular embodiments a purification is carried out after the digestion and repair step and an additional purification is carried out after the second universal amplification. In some of the embodiments adaptor-dimer by products resulting from the first amplification are removed from the resulting library, and in some embodiments an enriched population of amplified target nucleic acids contains a reduced amount of adaptor-dimer byproduct. In certain embodiments, adaptor-dimer byproducts are eliminated. In the foregoing methods the plurality of adaptors capable of amplification of one or more target nucleic acid sequences comprises a multiplex of adaptor pairs capable of amplification of at least two different target nucleic acid sequences. In some embodiments, each target specific pair of the plurality of adaptors includes up to 16,777,216 different adaptor combinations comprising different tag sequences. In certain embodiments each generated target specific amplicon sequence includes at least 1 different sequence and up to 107 different sequences. In some embodiments, the foregoing methods further comprise analyzing the sequence of the resulting library of target nucleic acid sequences. Such analyzing comprises sequencing by traditional sequencing reactions, high throughput next generation sequencing, targeted multiplex array sequence detection, or any combination of two or more of the foregoing. In other embodiments, the foregoing methods further comprise determining the abundance of at least one of the target nucleic acid sequences in the sample. Such determining is carried out by high throughput next generation sequencing in certain embodiments. In particular embodiments, such sequencing is carried out in a bidirectional manner, thereby generating sequence reads in both forward and reverse strands for any given amplicon. In some embodiments the foregoing methods comprise digestion reagent selected from any one or a combination of uracil DNA glycosylase (UDG), apurinic endonuclease (e.g., APE1), RecJf, formamidopyrimidine [fapy]-DNA glycosylase (fpg), Nth endonuclease III, endonuclease VIII, polynucleotide kinase (PNK), Taq DNA polymerase, DNA polymerase I and/or human DNA polymerase beta. In some embodiments, the foregoing methods comprise repair reagent selected from any one or a combination of Phusion DNA polymerase, Phusion U DNA polymerase, SuperFi DNA polymerase, Taq DNA polymerase, Human DNA polymerase beta, T4 DNA polymerase and/or T7 DNA polymerase, SuperFiU DNA polymerase, E. coli DNA ligase, T3 DNA ligase, T4 DNA ligase, T7 DNA ligase, Taq DNA ligase, and/or 9° N DNA ligase. In particular embodiments the foregoing methods comprise digestion and repair reagent selected from any one or a combination of uracil DNA glycosylase (UDG), apurinic endonuclease (e.g., APE1), Taq DNA polymerase, Phusion U DNA polymerase, SuperFiU DNA polymerase, 7 DNA ligase. In more particular embodiments the foregoing methods comprise digestion and repair reagent selected from any one or a combination of uracil DNA glycosylase (UDG), formamidopyrimidine [fapy]-DNA glycosylase (fpg), Phusion U DNA polymerase, Taq DNA polymerase, SuperFiU DNA polymerase, T4 PNK and T7 DNA ligase. In preferred embodiments, the foregoing methods generate compositions comprising nucleic acid library. In particularly preferred embodiments, generated compositions comprising nucleic acid library are useful for analysis of sequences. In specific embodiments, use comprises determination of low frequency allele(s) in a sample.

[0124] In one embodiment, provided is a method for preparing a library of target nucleic acid sequences comprising contacting a nucleic acid sample with a plurality of adaptors capable of amplification of one or more target nucleic acid sequences in the sample under conditions wherein the target nucleic acid(s) undergo a first amplification, digesting resulting first amplification products to reduce or eliminate resulting primer dimers and prepare partially digested target amplicons, producing gapped, double stranded amplicons, then repairing the partially digested target amplicons, and amplifying the repaired target amplicons in a second amplification using universal primers; wherein each of the plurality of adaptors comprises a universal handle sequence, one or more tag sequences, a target nucleic acid sequence and a cleavable moiety; and wherein at least two and up to one hundred thousand target specific adaptor pairs are included and wherein the target nucleic acid sequence of the adaptor includes at least one cleavable moiety, cleavable moieties are included in the flanking either end of the tag sequence and the universal handle sequence does not include the cleavable moiety. In certain embodiments the melting temperature of each universal sequence is higher than the melting temperature of each target nucleic acid sequence and each tag sequence present. Such methods thereby produce a library of target nucleic acid sequence. In particular embodiments such methods are carried out in a single, addition only workflow reaction, allowing for rapid production of highly multiplexed targeted libraries. In some embodiments, the digestion and repair is carried out in a single step. In particular embodiments the plurality of gapped polynucleotide products in digestion are contacted with the digestion and repair reagents simultaneously. In other embodiments the digestion and repair step is carried out in a temporally separate manner at different temperatures. In particular embodiments the plurality of gapped polynucleotide products in digestion are contacted sequentially with the digestion and repair reagents. In some embodiments one or more of the method steps is conducted in manual mode or in an automated mode or a combination thereof. In particular embodiments each of the method steps is carried out in automated mode. In some embodiments the foregoing methods further comprise at least one purification step. In particular embodiments a purification step is carried out only after the second universal amplification step. In other particular embodiments a purification is carried out after the digestion and repair step and an additional purification is carried out after the second universal amplification. In some of the embodiments adaptor-dimer by products resulting from the first amplification are removed from the resulting library, and in some embodiments an enriched population of amplified target nucleic acids contains a reduced amount of adaptor-dimer byproduct. In certain embodiments, adaptor-dimer byproducts are eliminated. In the foregoing methods the plurality of adaptors capable of amplification of two or more target nucleic acid sequences comprises a multiplex of adaptor pairs capable of amplification of target nucleic acid sequences. In certain embodiments all of the adaptors comprise tag sequences having cleavable groups flanking either end of the tag sequences. In some embodiments, each target specific pair of the plurality of adaptors includes up to 16,777,216 different adaptor combinations comprising different tag sequences. In certain embodiments each generated target specific amplicon sequence includes at least 1 different sequence and up to 107 different sequences. In some embodiments, the foregoing methods further comprise analyzing the sequence of the resulting library of target nucleic acid sequences. Such analyzing comprises sequencing by traditional sequencing reactions, high throughput next generation sequencing, targeted multiplex array sequence detection, or any combination of two or more of the foregoing. In other embodiments, the foregoing methods further comprise determining the abundance of at least one of the target nucleic acid sequences in the sample. Such determining is carried out by high throughput next generation sequencing in certain embodiments. In particular embodiments, such sequencing is carried out in a bidirectional manner, thereby generating sequence reads in both forward and reverse strands for any given amplicon. In some embodiments the foregoing methods comprise digestion reagent selected from any one or a combination of uracil DNA glycosylase (UDG), apurinic endonuclease (e.g., APE1), RecJf, formamidopyrimidine [fapy]-DNA glycosylase (fpg), Nth endonuclease III, endonuclease VIII, polynucleotide kinase (PNK), Taq DNA polymerase, DNA polymerase I and/or human DNA polymerase beta. In some embodiments, the foregoing methods comprise repair reagent selected from any one or a combination of Phusion DNA polymerase, Phusion U DNA polymerase, SuperFi DNA polymerase, Taq DNA polymerase, Human DNA polymerase beta, T4 DNA polymerase and/or T7 DNA polymerase, SuperFiU DNA polymerase, E. coli DNA ligase, T3 DNA ligase, T4 DNA ligase, T7 DNA ligase, Taq DNA ligase, and/or 9° N DNA ligase. In particular embodiments the foregoing methods comprise digestion and repair reagent selected from any one or a combination of uracil DNA glycosylase (UDG), apurinic endonuclease (e.g., APE1), Taq DNA polymerase, Phusion U DNA polymerase, SuperFiU DNA polymerase, 7 DNA ligase. In more particular embodiments the foregoing methods comprise digestion and repair reagent selected from any one or a combination of uracil DNA glycosylase (UDG), formamidopyrimidine [fapy]-DNA glycosylase (fpg), Phusion U DNA polymerase, Taq DNA polymerase, SuperFiU DNA polymerase, T4 PNK and T7 DNA ligase. In preferred embodiments, the foregoing methods generate compositions comprising nucleic acid library. In particularly preferred embodiments, generated compositions comprising nucleic acid library are useful for analysis of sequences. In specific embodiments, use comprises determination of low frequency allele(s) in a sample.

[0125] In one embodiment provided is a composition comprising a plurality of nucleic acid adaptors, wherein each of the plurality of adaptors comprise a 5′ universal handle sequence, one or more tag sequences, and a 3′ target nucleic acid sequence wherein each adaptor comprises a cleavable moiety, the target nucleic acid sequence of the adaptor includes at least one cleavable moiety, cleavable moieties are included flanking either end of the tag sequence and the universal handle sequence does not include the cleavable moiety, and at least two and up to one hundred thousand target specific adaptor pairs are included. In some embodiments the melting temperature of each adaptor universal sequence is higher than the melting temperature of each target nucleic acid sequence and each tag sequence present in the same adaptor. The provided compositions allow for rapid production of highly multiplexed targeted libraries. In particular embodiments, the composition comprises multiplex of adaptor pairs capable of amplification of at least two different target nucleic acid sequences. In certain embodiments, each target specific pair of the plurality of adaptors includes up to 16,777,216 different adaptor combinations comprising different tag sequences In certain embodiments, compositions each generated target specific amplicon produced by target specific pairs of the plurality of adaptors produces at least 1 different sequence and up to 107 different sequences. The foregoing compositions comprise adaptors wherein they are single stranded or double stranded. Yet additional embodiments provide kits comprising the adaptor compositions of any of the foregoing embodiments. In some embodiments such kits further comprise any one or more of an amplification reagent, a digestion reagent and a repair reagent. In certain embodiments such kits further comprise an amplification reagent, a digestion reagent and a repair reagent.

### EXEMPLIFICATION

### Example 1

[0126] Provided methods of the invention comprise streamlined procedures enabling rapid, highly multiplexed PCR. See FIG. 1. The invention optionally allows for the incorporation of one or more unique tag sequences, if so desired. Exemplary methods of the invention comprise the following protocols:

### Example 1A

### Materials and Method

[0127] Optional Reverse Transcription (RT) Reaction method (10 uL reaction)_may be carried out in samples where RNA and DNA are analyzed:

### Materials

[0128] 2 uL 5× SuperScript™ VILO™ (Thermo Fisher Scientific) mix into a microtube or microwell, ≤8 uL volume of DNA+RNA sample for ≤20 ng total amount of DNA+RNA sample (˜1% RNA sample of the total nucleic acid (TNA));
[0129] nuclease-free H2O to the above tube/well to make 10 uL total reaction volume;

### Method:

[0130] 42 C for 30 min
[0131] 85 C for 1 min
[0132] 4 C hold (indefinitely)

### Amplification:

### Materials

[0133] ul dH₂O (to 30 ul final)
[0134] ul 20 ng genomic DNA sample
[0135] 48 nM Panel of Adaptors
[0136] 15 ul PhusionU multiplex PCR master mix
[0137] 2.4 ul 2 u/ul Phusion U DNA polymerase

### Amplification:

[0138] 98 C for 2 min
[0139] 3 cycles of the following:
   [0140] 98 C for 30 s
   [0141] 64 C for 2 min
   [0142] 62 C for 2 min
   [0143] 60 C for 4 min
   [0144] 58 C for 2 min
   [0145] 72 C for 30 s
[0146] 72 C for 2 min
[0147] 4 C hold (indefinitely).

### Digestion, Fill-in, Ligation:

### Materials

[0148] 2 ul (5 u/ul) UDG,
[0149] 4 ul (10 u/ul) FPG
[0150] 0.5 ul (10 u/ul) T4 PNK
[0151] 1 ul (3000 u/ul) T7 ligase
[0152] 1 ul (10 mM) ATP.

### Method

[0153] Mix the materials above, add to reaction mixture.
[0154] Incubate:
   [0155] 30 C for 20 min
   [0156] 55 C for 20 min
   [0157] 25 C for 10 min
   [0158] 98 C for 2 min
   [0159] 4 C hold (indefinitely)

[0160] The resulting repaired sample is purified using 35 ul Ampure® beads (Beckman Coulter, Inc.) according to the manufacturer instructions.

### Amplification:

### Materials

[0161] 1 ul for each P1 and A-universal primers, optionally containing barcode sequence (Ion Xpress™ Adapters, Thermo Fisher Scientific)

### Method

[0162] Incubate:
   [0163] 98 C for 2 min
[0164] 22 cycles of
   [0165] 98 C for 15 s
   [0166] 64 C for 15 s
   [0167] 72 C for 15 s
[0168] 72 C for 5 min
[0169] 4 C hold (indefinitely)

[0170] The resulting sample is purified using 35 ul Ampure® beads (Beckman Coulter, Inc.) according to the manufacturer instructions. Optionally, the purification step is repeated 1× to 2×.

### Example 1B

### Materials and Method

[0171] Optional Reverse Transcription (RT) Reaction method (10 uL reaction)_may be carried out in samples where RNA and DNA are analyzed:

### Materials

[0172] 2 uL 5× SuperScript™ VILO™ (Thermo Fisher Scientific) mix into a microtube or microwell, ≤8 uL volume of DNA+RNA sample for ≤20 ng total amount of DNA+RNA sample (˜1% RNA sample of the total nucleic acid (TNA));
[0173] nuclease-free H2O to the above tube/well to make 10 uL total reaction volume;

### Method:

[0174] 42 C for 30 min
[0175] 85 C for 1 min
[0176] 4 C hold (indefinitely)

### Amplification:

### Materials

[0177] ul dH₂O (to 30 ul final)
[0178] ul 20 ng genomic DNA sample
[0179] 48 nM Panel of Adaptors
[0180] 15 ul PhusionU multiplex PCR master mix
[0181] 2.4 ul 2 u/ul Phusion U DNA polymerase

### Amplification:

[0182] 98 C for 2 min
[0183] 3 cycles of the following:
   [0184] 98 C for 30 s
   [0185] 64 C for 2 min
   [0186] 62 C for 2 min
   [0187] 60 C for 4 min
   [0188] 58 C for 2 min
   [0189] 72 C for 30 s
[0190] 72 C for 2 min
[0191] 4 C hold (indefinitely).

### Digestion, Fill-in, Ligation:

### Materials

[0192] 2 ul (5 u/ul) UDG,
[0193] 4 ul (10 u/ul) APE1
[0194] 0.5 ul (1 u/ul) Taq polymerase
[0195] 1 ul (3000 u/ul) T7 ligase
[0196] 1 ul (10 mM) ATP.

### Method

[0197] Mix the materials above, add to reaction mixture.
[0198] Incubate:
   [0199] 30 C for 20 min
   [0200] 55 C for 20 min
   [0201] 25 C for 10 min
   [0202] 98 C for 2 min
   [0203] 4 C hold (indefinitely)

### Amplification:

### Materials

[0204] 1 ul for each P1 and A-universal primers, optionally containing barcode sequence (Ion Xpress™ Adapters, Thermo Fisher Scientific)

### Method

[0205] Incubate:
   [0206] 98 C for 2 min
[0207] 22 cycles of
   [0208] 98 C for 15 s
   [0209] 64 C for 15 s
   [0210] 72 C for 15 s
[0211] 72 C for 5 min
[0212] 4 C hold (indefinitely)

[0213] The resulting sample is purified using 35 ul Ampure® beads (Beckman Coulter, Inc.) according to the manufacturer instructions. Optionally, purification step may be repeated 1× to 2×.

### Example 1C

### Materials and Method

[0214] Optional Reverse Transcription (RT) Reaction method (10 uL reaction) may be carried out in samples where RNA and DNA are analyzed:

### Materials

[0215] 2 uL 5× SuperScript™ VILO™ (Thermo Fisher Scientific) mix into a microtube or microwell, ≤8 uL volume of DNA+RNA sample for ≤20 ng total amount of DNA+RNA sample (˜1% RNA sample of the total nucleic acid (TNA));
[0216] nuclease-free H2O to the above tube/well to make 10 uL total reaction volume;

### Method:

[0217] 42 C for 30 min
[0218] 85 C for 1 min
[0219] 4 C hold (indefinitely)

### Amplification:

### Materials

[0220] _ ul dH₂O (to 30 ul final)
[0221] _ ul Genomic DNA sample (˜20 ng)
[0222] 6 ul Adaptor Panel 250 nM
[0223] 15 ul PhusionU multiplex PCR master mix (F-562)
[0224] 3.0 ul 2 u/ul SuperFiU DNA Polymerase

### Amplification

[0225] Assemble mixture of materials in reaction in 96-well plate wells, amplify using method:
[0226] 99 C for 2 min
[0227] 3 cycles of the following:
   [0228] 99 C for 30 s
   [0229] 64 C for 2 min
   [0230] 62 C for 2 min
   [0231] 60 C for 4 min
   [0232] 58 C for 2 min
   [0233] 72 C for 30 s
[0234] 72 C for 2 min
[0235] 4 C hold (indefinitely)

### Digestion, Fill-in, Ligation:

### Materials

[0236] 0.1 ul VIP Oligo 10 uM (P/N 4385451 Thermo Fisher Scientific, Inc.)
[0237] 2 ul (5 u/ul) UDG
[0238] 4 ul (10 u/ul) APE1 (NEB, M0282L)
[0239] 0.5 ul (1 u/ul) Taq polymerase (EP0404)
[0240] 1 ul (3000 u/ul) T7 ligase (NEB M0318L)
[0241] 1 ul (10 mM) ATP

### Method

[0242] Mix the above materials, add into reaction mixture
[0243] Incubate:
[0244] 30 C for 15 min
[0245] 50 C for 15 min
[0246] 55 C for 15 min
[0247] 25 C for 10 min
[0248] 98 C for 2 min
[0249] 4 C hold (indefinitely)

### Amplification

### Materials

[0250] 1 ul for each P1 and A-Barcode-universal primers optionally containing barcode sequence (Ion Xpress™ Adapters, Thermo Fisher Scientific)

### Method

[0251] Add into the reaction wells the above materials, amplify:
[0252] 99 C for 2 min
[0253] 20 cycles:
   [0254] 99 C for 20 s
   [0255] 64 C for 20 s
   [0256] 72 C for 20 s
[0257] 72 C for 5 min
[0258] 4 C hold (indefinitely)

[0259] The resulting sample is purified using 1× Ampure® beads (Beckman Coulter, Inc.) according to the manufacturer instructions. Optionally, purification step may be repeated 1× to 2×.

### Example 1D

### Materials and Method

[0260] Optional Reverse Transcription (RT) Reaction method (10 uL reaction) may be carried out in samples where RNA and DNA are analyzed:

### Materials

[0261] 2 uL 5× SuperScript™ VILO™ (Thermo Fisher Scientific) mix into a microtube or microwell, ≤8 uL volume of DNA+RNA sample for ≤20 ng total amount of DNA+RNA sample (˜1% RNA sample of the total nucleic acid (TNA));
[0262] nuclease-free H2O to the above tube/well to make 10 uL total reaction volume;

### Method:

[0263] 42 C for 30 min
[0264] 85 C for 1 min
[0265] 4 C hold (indefinitely)

### Amplification:

### Materials

[0266] _x_ul nuclease free dH₂O (x to 30 ul final)
[0267] _y_ul Genomic DNA sample (y ˜20 ng) or y 10 uL of RT reaction for DNA+RNA sample
[0268] 12.5 ul Adaptor Panel for ˜50 nM each primer concentration
[0269] 7.5 ul Platinum™ SuperFi™ PCR master mix, replacing SuperFi enzyme with 0.96 U/μL SuperFiU™ DNA Polymerase
[0270] 3.0 ul 2 U/ul SuperFiU™ DNA Polymerase
[0271] optionally, an control may be included in reaction, (e.g, Acrometrix Oncology Hotspot Control (Thermo Fisher Scientific))

### Amplification

[0272] Assemble mixture of materials in reaction in 96-well plate wells, seal, vortex and centrifuge plate, amplify using method:
[0273] 99 C for 1 s
[0274] 3 cycles of the following:
[0275] 99 C for 30 s
[0276] 64 C for 2 min
[0277] 60 C for 6 min
[0278] 72 C for 30 s
[0279] then 72 C for 2 min
[0280] 4 C hold (indefinitely)

### Digestion, Fill-in, Ligation:

### Materials

[0281] 0.1 ul VIP Oligo 0.2 uM (P/N 4385451 Thermo Fisher Scientific, Inc.)
[0282] 2 ul (5 u/ul) UDG
[0283] 4 ul (8 U/ul) APE1 (NEB, M0282L)
[0284] 0.5 ul (0.1 U/ul) Taq polymerase (EP0404)
[0285] 1 ul (6000 U/ul) T7 ligase (NEB M0318L)
[0286] 1 ul (2 mM) ATP
[0287] 0.5 ul mAB2A7 (0.6 mg/mL)
[0288] 0.25 ul mAB5D3 (0.25 mg/mL)

### Method

[0289] Mix the above materials, add into reaction mixture, seal plate, vortex and centrifuge
[0290] Incubate:
[0291] 30 C for 15 min
[0292] 50 C for 15 min
[0293] 55 C for 15 min
[0294] 25 C for 10 min
[0295] 98 C for 2 min
[0296] 4 C hold (indefinitely)

### Amplification

### Materials

[0297] 1 ul for each P1 and A-Barcode-universal primers optionally barcoded sequence (Ion Xpress™ Adapters, Thermo Fisher Scientific); or 1 uL each of 10 uM BC1-Ah, and 1 uL of 10 uM P1-Plh (IonCode™ Barcode Adapters, Thermo Fisher Scientific), for uni-directional library

### Method

[0298] Add into the reaction wells the above materials, seal plate, vortex and centrifuge, then amplify:
[0299] 99 C for 15 s
[0300] 5 cycles:
   [0301] 99 C for 15 s
   [0302] 62 C for 20 s
   [0303] 72 C for 20 s
[0304] 15 cycles:
   [0305] 99 C for 15 s
   [0306] 70 C for 40 s
[0307] 72 C for 5 min
[0308] 4 C hold (indefinitely)

[0309] The resulting sample is purified using 1× Ampure® beads (Beckman Coulter, Inc.) according to the manufacturer instructions.

[0310] Optionally, purification may be repeated 1× to 2×.

### Example 1E

### Materials and Method

### Amplification:

### Materials

[0311] x__ul dH₂O (x to 30 ul final)
[0312] y__ul Genomic DNA sample (y˜20 ng) or y 10 uL of RT reaction for DNA+RNA sample
[0313] 12.5 ul Adaptor Panel for ˜50 nM each primer concentration
[0314] 7.5 ul Platinum™ SuperFi™ PCR master mix, replacing SuperFi enzyme with 0.96 U/μL SuperFiU™ DNA Polymerase
[0315] 3.0 ul 2 u/ul SuperFiU™ DNA Polymerase

### Amplification

[0316] Assemble mixture of materials in reaction in 96-well plate wells, seal plate, vortex and centrifuge, then amplify using method:
[0317] 99 C for 1 s
[0318] 3 cycles of the following:
[0319] 99 C for 30 s
[0320] 64 C for 2 min
[0321] 60 C for 6 min
[0322] 72 C for 30 s
[0323] 72 C for 2 min
[0324] 4 C hold (indefinitely)

### Digestion, Fill-in, Ligation:

### Materials

[0325] 0.1 ul VIP Oligo 0.2 uM (P/N 4385451 Thermo Fisher Scientific, Inc.)
[0326] 2 ul (5 u/ul) UDG
[0327] 4 ul (8 U/ul) APE1 (NEB, M0282L)
[0328] 0.5 ul (0.1 U/ul) Taq polymerase (EP0404)
[0329] 1 ul (6000 U/ul) T7 ligase (NEB M0318L)
[0330] 1 ul (2 mM) ATP
[0331] 0.5 ul mAB2A7 (0.6 mg/mL)
[0332] 0.25 ul mAB5D3 (0.25 mg/mL)

### Method

[0333] Mix the above materials, add into reaction mixture, seal plate, vortex and centrifuge
[0334] Incubate:
[0335] 30 C for 15 min
[0336] 50 C for 15 min
[0337] 55 C for 15 min
[0338] 25 C for 10 min
[0339] 98 C for 2 min
[0340] 4 C hold (indefinitely)

### Amplification

### Materials

[0341] 1 uL of 10 uM BC1-Ah, 1 uL of 10 uM P1-Uh, 1.5 uL of 10 uM BC1-Uh, and 1.5 uL of 10 uM P1-Ah. herein for bi-directional library preparation. BC1-Ah comprises barcode sequence and complementary sequence to universal A handle of forward adapters herein; BC1-Uh comprises barcode sequence and complementary sequence to universal handle of any of reverse adapters B, C, D, or E herein; P1-Uh comprises Ion adapter P1 adapter sequence, barcode sequence, and complementary sequence to universal B, C, D, or E handle of any of reverse adapters B, C, D, or E herein; P1-Ah comprises Ion adapter P1 adapter sequence, barcode sequence, and complementary sequence to universal handle of A handle of forward adapters herein. See FIG. 7.

### Method

[0342] Add into the reaction wells the above materials, seal plate, vortex, centrifuge then amplify:
[0343] 99 C for 15 s
[0344] 5 cycles:
[0345] 99 C for 15 s
[0346] 62 C for 20 s
[0347] 72 C for 20 s
[0348] 15 cycles:
[0349] 99 C for 15 s
[0350] 70 C for 40 s
[0351] 72 C for 5 min
[0352] 4 C hold (indefinitely)

[0353] The resulting sample is purified using 1× Ampure® beads (Beckman Coulter, Inc.) according to the manufacturer instructions.

[0354] Optionally, purification may be repeated 1× to 2×.

### Example 1F

### Materials and Method

[0355] Optional Reverse Transcription (RT) Reaction method (10 uL reaction)_may be carried out in samples where RNA and DNA are analyzed:

### Materials

[0356] 2 uL 5× SuperScript™ VILO™ (Thermo Fisher Scientific) mix into a microtube or microwell, ≤8 uL volume of DNA+RNA sample for ≤20 ng total amount of DNA+RNA sample (˜1% RNA sample of the total nucleic acid (TNA));
[0357] nuclease-free H2O to the above tube/well to make 10 uL total reaction volume;

### Method:

[0358] 42 C for 30 min
[0359] 85 C for 1 min
[0360] 4 C hold (indefinitely)

### Amplification:

### Materials

[0361] _x_ul nuclease free dH₂O (x to 30 ul final)
[0362] _y_ul Genomic DNA sample (y ˜20 ng) or y 10 uL of RT reaction for DNA+RNA sample
[0363] 12.5 ul Adaptor Panel for ˜50 nM each primer concentration
[0364] 7.5 ul Platinum™ SuperFi™ PCR master mix, replacing SuperFi enzyme with 0.96 U/μL SuperFiU™ DNA Polymerase
[0365] 3.0 ul 2 U/ul SuperFiU™ DNA Polymerase
[0366] optionally, a control may be included in reaction, (e.g, Acrometrix Oncology Hotspot Control (Thermo Fisher Scientific))

### Amplification

[0367] Assemble mixture of materials in reaction in 96-well plate wells, seal, vortex and centrifuge plate, amplify using method:
[0368] 99 C for 1 s
[0369] 3 cycles of the following:
[0370] 99 C for 30 s
[0371] 64 C for 2 min
[0372] 60 C for 6 min
[0373] 72 C for 30 s
[0374] then 72 C for 2 min
[0375] 4 C hold (indefinitely)

### Digestion, Fill-in, Ligation:

### Materials

[0376] 0.1 ul VIP Oligo 0.2 uM (P/N 4385451 Thermo Fisher Scientific, Inc.)
[0377] 2 ul (5 u/ul) UDG
[0378] 4 ul (8 U/ul) APE1 (NEB, M0282L)
[0379] 0.5 ul (0.1 U/ul) Taq polymerase (EP0404)
[0380] 1 ul (6000 U/ul) T7 ligase (NEB M0318L)
[0381] 1 ul (2 mM) ATP
[0382] 0.5 ul mAB2A7 (0.6 mg/mL)
[0383] 0.25 ul mAB5D3 (0.25 mg/mL)

### Method

[0384] Mix the above materials, add into reaction mixture, seal plate, vortex and centrifuge
[0385] Incubate:
[0386] 30 C for 15 min
[0387] 50 C for 15 min
[0388] 55 C for 15 min
[0389] 25 C for 10 min
[0390] 98 C for 2 min
[0391] 4 C hold (indefinitely)

### Amplification

### Materials

[0392] 1 ul for each of (1) P5-index-A-handle primer; (2) P5-index-I-handle primer; (3) P7-index-A-handle primer; and (4) P7-index-I-handle primer. See Table F.

### Method

[0393] Add into the reaction wells the above materials, seal plate, vortex and centrifuge, then amplify:
[0394] 99 C for 15 s
[0395] 5 cycles:
   [0396] 99 C for 15 s
   [0397] 62 C for 20 s
   [0398] 72 C for 20 s
[0399] 15 cycles:
   [0400] 99 C for 15 s
   [0401] 70 C for 40 s
[0402] 72 C for 5 min
[0403] 4 C hold (indefinitely)

[0404] The resulting sample is purified using 1× Ampure® beads (Beckman Coulter, Inc.) according to the manufacturer instructions.

[0405] Optionally, purification may be repeated 1× to 2×.

### Example 2

[0406] The first step of provided methods comprises a few rounds of amplification, for example, three to six cycles of amplification, and in certain instances, three cycles of amplification using forward and reverse adaptors to each gene specific target sequence. Each adaptor contains a 5′ universal sequence, and a 3′ gene specific target sequence. In some embodiments adaptors optionally comprise a unique tag sequence located between the 5′ universal and the 3′ gene specific target sequences.

[0407] In specific embodiments wherein unique tag sequences are utilized, each gene specific target adaptor pair includes a multitude of different unique tag sequences in each adaptor. For example, each gene specific target adaptor comprises up to 4096 TAGs. Thus, each target specific adaptor pair comprises at least four and up to 16,777,216 possible combinations.

[0408] Each of the provided adaptors comprises a cleavable uracil in place of thymine at specific locations in the forward and reverse adaptor sequences. Positions of uracils (Us) are consistent for all forward and reverse adaptors having unique tag sequences, wherein uracils (Us) are present flanking the 5′ and 3′ ends of the unique tag sequence when present; and Us are present in each of the gene specific target sequence regions, though locations for each gene specific target sequence will inevitably vary. Uracils flanking each unique tag sequence (UT) and in gene-specific sequence regions are designed in conjunction with sequences and calculated Tm of such sequences, to promote fragment dissociation at a temperature lower than melting temperature of the universal handle sequences, which are designed to remain hybridized at a selected temperature. Variations in Us in the flanking sequences of the UT region are possible, however designs keep the melting temperature below that of the universal handle sequences on each of the forward and reverse adaptors. Exemplary adaptor sequence structures comprise:

Forward Adaptor:
SEQ ID NO: 1
------A Handle----- ------*UT*------ --Gene Specific--
TCTGTACGGTGACAAGGCG-U-NNNACTNNNTGA-U-GAGGACCGUCGCTUGGT
Rev Adaptor B
SEQ ID NO: 2
CTCTATGGGCAGTCGGTGAT-U-NNNACTNNNTGA-U-CCTTCTGCAUGGTATTCTTTCTCTUCC
-----B Handle------- --------*UT*---- -------Gene Specific-------
Rev Adaptor C
SEQ ID NO: 3
TCTAGTCGGTCAGTCACGG-U-NNNACTNNNTGA-U-CCTTCTGCAUGGTATTCTTTCTCTUCC
-----C Handle------- ------UT------- -------Gene Specific-------
Rev Adaptor D
SEQ ID NO: 4
TCTAGTGCTGCAGTCACGG-U-NNNACTNNNTGA-U-CCTTCTGCAUGGTATTCTTTCTCTUCC
-----D Handle------- ------UT------- -------Gene Specific--------
Rev Adaptor E
SEQ ID NO: 5
TGACAAGGCGTAGTCACGG-U-NNNACTNNNTGA-U-CCTTCTGCAUGGTATTCTTTCTCTUCC
-----E Handle------- ------UT------- -------Gene Specific-------

[0409] Wherein each N is a base selected from A, C, G, or T and the constant sections of the UT region are used as anchor sequences to ensure correct identification of variable (N) portion. The constant and variable regions of the UT can be significantly modified (e.g., alternative constant sequence, >3 Ns per section) as long as the Tm of the UT region remains below that of the universal handle regions. Importantly, cleavable uracils are absent from each forward (e.g., TCTGTACGGTGACAAGGCG (SEQ ID NO:6) and reverse (e.g., CTCTATGGGCAGTCGGTGAT (SEQ ID NO:7) universal handle sequence.

[0410] Enzymes used for amplification include (but are not limited to): Phusion U DNA polymerase; SuperFi U DNA polymerase; Taq DNA polymerase; Veraseq Ultra DNA polymerase. SuperFi U DNA Polymerase is a modified version of high fidelity SuperFi DNA Polymerase, available from Thermo Fisher Scientific. SuperFiU DNA comprises a modification in the uracil-binding pocket (e.g., AA 36) and a family B polymerase catalytic domain (e.g., AA 762). SuperFiU is described in U.S. Provisional patent application No. 62/524,730 filed Jun. 26, 2017, and International Patent application no. PCT/EP2018/066896, filed Jun. 25, 2018 which are each hereby incorporated by reference. Polymerase enzymes may be limited in their ability to utilize uracil and/or any alternative cleavable residues (e.g., inosine, etc.) included into adaptor sequences. In certain embodiments, it may also be advantageous to use a mixture of polymerases to reduce enzyme specific PCR errors.

[0411] The second step of methods involves partial digestion of resulting amplicons, as well as any unused uracil-containing adaptors. For example, where uracil is incorporated as a cleavable site, digestion and repair includes enzymatic cleavage of the uridine monophosphate from resulting primers, primer dimers and amplicons, and melting DNA fragments, then repairing gapped amplicons by polymerase fill-in and ligation. This step reduces and potentially eliminates primer-dimer products that occur in multiplex PCR. In some instances, digestion and repair are carried out in a single step. In certain instances, it may be desirable to separate digestion and repair-steps temporally. For example, thermolabile polymerase inhibitors may be utilized in conjunction with methods, such that digestion occurs at lower temperatures (25-40° C.), then repair is activated by increasing temperature enough to disrupt a polymerase-inhibitor interaction (e.g., polymerase-Ab), though not high enough to melt the universal handle sequences.

[0412] Uracil-DNA Glycosylase (UDG) enzyme can be used to remove uracils, leaving abasic sites which can be acted upon by several enzymes or enzyme combinations including (but not limited to): APE 1-Apurinic/apyrimidinic endonuclease; FPG-Formamidopyrimidine [fapy]-DNA glycosylase; Nth-Endonuclease III; Endo VIII-Endonuclease VIII; PNK-Polynucleotide Kinase; Taq-Thermus aquaticus DNA polymerase; DNA pol I-DNA polymerase I; Pol beta-Human DNA polymerase beta. In a particular implementation, the method uses Human apurinic/apyrimidinic endonuclease, APE1. APE1 activity leaves a 3′-OH and a 5′ deoxyribose-phosphate (5′-dRP). Removal of the 5′-dRP can be accomplished by a number of enzymes including recJ, Polymerase beta, Taq, DNA pol I, or any DNA polymerase with 5′-3′ exonuclease activity. Removal of the 5′-dRP by any of these enzymes creates a ligatable 5′-phosphate end. In another implementations, UDG activity removes the Uracil and leaves and abasic site which is removed by FPG, leaving a 3′ and 5′-phosphate. The 3′-phosphate is then removed by T4 PNK, leaving a polymerase extendable 3′-OH. The 5′-deoxyribose phosphate can then be removed by Polymerase beta, fpg, Nth, Endo VIII, Taq, DNA pol I, or any other DNA polymerase with 5′-3′ exonuclease activity. In a particular implementation Taq DNA polymerase is utilized.

[0413] Repair fill-in process can be accomplished by almost any polymerase, possibly the amplification polymerase used for amplification in step 1 or by any polymerase added in step 2 including (but not limited to): Phusion DNA polymerase; Phusion U DNA polymerase; SuperFi DNA polymerase; SuperFi U DNA polymerase; TAQ; Pol beta; T4 DNA polymerase; and T7 DNA polymerase. Ligation repair of amplicons can be performed by many ligases including (but not limited to): T4 DNA ligase; T7 DNA ligase; Taq DNA ligase. In a particular implementation of the methods, Taq DNA polymerase is utilized and ligation repaired in accomplished by T7 DNA ligase.

[0414] A last step of library preparation involves amplification of the repaired amplicons by standard PCR protocols using universal primers that contain sequences complementary to the universal handle sequences on the 5′ and 3′ ends of prepared amplicons. For example, an A-universal primer, and a P1 universal primer, each part of the Ion Express Adaptor Kit (Thermo Fisher Scientific, Inc.) may optionally contain a sample specific barcode. The last library amplification step may be performed by many polymerases including, but not limited to: Phusion DNA polymerase; Phusion U DNA polymerase; SuperFi DNA polymerase; SuperFi U DNA polymerase; Taq DNA polymerase; Veraseq Ultra DNA polymerase.

[0415] 2A, In one specific implementation, adaptors were designed using the composition design approach provided herein, including universal handle-unique tag-gene specific target sequence described in Example 2 above, and targeted to genes using the ONCOMINE™ Focus Research Panel (Thermo Fisher Scientific, Inc.) target sequences and ION AMPLISEQ™ Designer (Thermo Fisher Scientific, Inc). Forward and reverse adaptors described above were utilized comprising

Forward Adaptor:
SEQ ID NO: 1
------A Handle----- ------*UT*------ --Gene Specific--
TCTGTACGGTGACAAGGCG-U-NNNACTNNNTGA-U-GAGGACCGUCGCTUGGT
Rev Adaptor B
SEQ ID NO: 2
CTCTATGGGCAGTCGGTGAT-U-NNNACTNNNTGA-U-CCTTCTGCAUGGTATTCTTTCTCTUCC
-----B Handle------- --------*UT*---- -------Gene Specific-------

With target sequences specific to targets as in Table A, and adaptors each comprise 4096 unique tag sequences for each gene specific target sequence, resulting in an estimate of 16,777,216 different unique tag combinations for each gene specific target sequence pair. Preparation of library was carried out according to the method described above for Example 1A. Formamidopyrimidine [fapy]-DNA glycosylase (FPG)/UDG enzyme is utilized for digestion, which is expected to create abasic sites at all uracil positions, FPG is expected to cleave on the 5′ and 3′ side of the abasic site (leaving a 3′-phosphate and a 5′ phosphate) and removal of the 3′ phosphate (by T4 PNK for example) should produce an extendable 3′-OH and a ligatable 5′-phosphate. However, as shown by the BioAnalyzer trace (See FIG. 2), this process consistently failed to generate recoverable product. The process can be rescued however by the addition of an additional purification step post-repair. The purification process can be anything inactivates and removes the repair enzymes prior to the next amplification step. Similar results were obtained if endoVIII was utilized.

[0416] 2B. In another specific implementation, adaptors were prepared as described in section 2A for targets of the ONCOMINE™ Focus Assay. See Table B. Forward and reverse adaptors described above were utilized comprising

Forward Adaptor:
SEQ ID NO: 1
------A Handle----- ------*UT------ --Gene Specific--
TCTGTACGGTGACAAGGCG-U-NNNACTNNNTGA-U-GAGGACCGUCGCTUGGT
Reverse Adaptor was any of Rev Adaptor B, Rev Adaptor C, Rev
Adaptor D, Rev Adaptor E: Rev Adaptor B
SEQ ID NO: 2
CTCTATGGGCAGTCGGTGAT-U-NNNACTNNNTGA-U-CCTTCTGCAUGGTATTCTTTCTCTUCC
-----B Handle------- --------*UT*---- -------Gene Specific-------
Rev Adaptor C
SEQ ID NO: 3
TCTAGTCGGTCAGTCACGG-U-NNNACTNNNTGA-U-CCTTCTGCAUGGTATTCTTTCTCTUCC
-----C Handle------- ------UT------- -------Gene Specific-------
Rev Adaptor D
SEQ ID NO: 4
TCTAGTGCTGCAGTCACGG-U-NNNACTNNNTGA-U-CCTTCTGCAUGGTATTCTTTCTCTUCC
-----D Handle------- ------UT------- -------Gene Specific-------
Rev Adaptor E
SEQ ID NO: 5
TGACAAGGCGTAGTCACGG-U-NNNACTNNNTGA-U-CCTTCTGCAUGGTATTCTTTCTCTUCC
-----E Handle------- ------UT------- -------Gene Specific-------

With target sequences specific to targets as in Table B, and adaptors each comprise 4096 unique tag sequences for each gene specific target sequence, resulting in an estimate of 16,777,216 different unique tag combinations for each gene specific target sequence pair. Preparation of library was carried out according to the method described above for 1C. See FIG. 3, Table 1. Similar successful sequencing results were generated with each of the reverse adaptor pairings.

### Example 3

[0417] Prepared libraries are sequenced, and analyzed. Sequencing can be carried out by a variety of known methods, including, but not limited to sequencing by synthesis, sequencing by ligation, and/or sequencing by hybridization. Sequencing has been carried out in the examples herein using the Ion Torrent platform (Thermo Fisher Scientific, Inc.), however, libraries can be prepared and adapted for analysis, e.g., sequencing, using any other platforms, e.g., Illumina, PacBio, etc. Result may be analyzed using a number of metrics to assess performance, for example:
[0418] # of families (with ng input DNA captured) The median # of families is a measure of the number of families that maps to an individual target. In this case, each unique molecular tag is a family.
[0419] Uniformity is a measure of the percentage of target bases covered by at least 0.2× the average read depth. This metric is used to ensure that the technology does not selectively under-amplify certain targets.
[0420] Positives/Negatives: When a control sample with known mutations is utilized is analyzed (e.g., Acrometrix Oncology Hotspot Control DNA, Thermo Fisher Scientific, Inc.), the number of True Positives can be tracked.
   [0421] True Positives: The number of True Positives informs on the number of mutations that were present and correctly identified.
   [0422] False positives (FP): (Hot spot and Whole Target) The number of False Positives informs on the number of mutations that are determined to be present, but known not to be in the sample.
   [0423] False negatives (FN) (if acrometrix spike-in is used) The number of False Negatives informs on the number of mutations that were present but not identified.
[0424] On/Off Target is the percentage of mapped reads that were aligned/not aligned over a target region. This metric is used to ensure the technology amplifies predominantly the targets to which the panel was designed.
[0425] Low quality is tracked to ensure the data is worth analyzing. This metric is a general system metric and isn't directly related to this technology.

### Example 4

[0426] One benefit of the instant invention is the ability to use Ampliseq.com designer in conjunction with the provided methodology. Adaptors were designed using the composition design approach provided herein, including universal handle-unique tag-gene specific target sequence described in Example 2 above, and targeted to genes using the ONCOMINE™ Focus Research Panel (Thermo Fisher Scientific, Inc.) target sequences and ION AMPLISEQ™ Designer (Thermo Fisher Scientific, Inc). Forward and reverse adaptors described above were utilized comprising

Forward Adaptor:
SEQ ID NO: 1
------A Handle----- ------*UT*------ --Gene Specific--
TCTGTACGGTGACAAGGCG-U-NNNACTNNNTGA-U-GAGGACCGUCGCTUGGT
Rev Adaptor B
SEQ ID NO: 2
CTCTATGGGCAGTCGGTGAT-U-NNNACTNNNTGA-U-CCTTCTGCAUGGTATTCTTTCTCTUCC
-----B Handle------- --------*UT*---- -------Gene Specific-------

[0427] With target sequences specific to targets as in Table A, and adaptors each comprise 4096 unique tag sequences for each gene specific target sequence, resulting in an estimate of 16,777,216 different unique tag combinations for each gene specific target sequence pair. Library was prepared using 20 ng of genomic DNA and ˜1% Acrometrix Oncomine™ Hotspot Control (AOHC) DNA (Thermo Fisher Scientific, Inc.), according to the protocol described above in Example 1C. Prepared library was sequenced using Ion 520/530 Templating/Sequencing kits and instrumentation (Thermo Fisher Scientific, Inc.). Performance with the panel (eg., yield, uniformity) indicates the technology is able to effectively make use of the designer pipeline. See FIG. 4A-4C.

[0428] Results using the AOHC DNA (shown in Table 1) demonstrate that, using this protocol, we effectively identify most of the True Positives (71 or 75) present in the AOHC and importantly did not generate any False positives.

TABLE 1

| | | | Oncology | Oncology |
|---|---|---|---|---|
| | Oncology | BRCA | HotSpot | HotSpot |
| | Panel | Panel | Panel | Bidirectional |
| | (Ex 4) | (Ex 5) | (Ex 3) | (ex 6) |
| True Positives | 75 | NA | NA | NA |
| TP in SNP, INDEL | 71; 4 | NA | NA | NA |
| False Negatives | 3 | NA | NA | NA |
| False Positives | 0 | 0 | 0 | 0 |
| Uniformity | 98.60% | 100% | 100% | 100% |
| Low Quality | 15% | 28% | 31% | 26% |
| On Target | 98% | 95% | 96% | 95% |
| # of Families | 4398 | 5208 | 8755 | 6391 |

### Example 5

[0429] Adaptors were designed according to the composition design approach provided herein, including universal handle-unique tag-gene specific target sequence described in Example 2 above, and targeted to genes using the BRCA Research Panel (Thermo FisherScientific, Inc.) target sequences and ION AMPLISEQ™ Designer (Thermo Fisher Scientific, Inc). Forward and reverse adaptors described above were utilized comprising

Forward Adaptor:
SEQ ID NO: 1
------A Handle----- ------*UT*------ --Gene Specific--
TCTGTACGGTGACAAGGCG-U-NNNACTNNNTGA-U-GAGGACCGUCGCTUGGT
Rev Adaptor B
SEQ ID NO: 2
CTCTATGGGCAGTCGGTGAT-U-NNNACTNNNTGA-U-CCTTCTGCAUGGTATTCTTTCTCTUCC
-----B Handle------- --------*UT*---- -------Gene Specific-------

[0430] With target sequences specific to targets as in Table C, and adaptors each comprise 4096 unique tag sequences for each gene specific target sequence, resulting in an estimate of 16,777,216 different unique tag combinations for each gene specific target sequence pair. Library was prepared using 20 ng genomic DNA according to the protocol described above in Example 1C Prepared library was sequenced using Ion 520/530 Templating/Sequencing kits and instrumentation (Thermo Fisher Scientific, Inc.). Similar to Example 5, performance (e.g., yield, uniformity) with the panel indicates the technology is able to use the designer pipeline. See FIG. 5 and Table 1.

### Example 6

[0431] Primers were designed using the composition design approach provided herein and targeted to oncology genes using those of the panel target sequences as described above in Example 4, except that the library amplification step utilized two primer pairs (to put the two universal sequences on each end of amplicons, e.g., an A-universal handle and a P1-universal handle on each end) to enable bi-directional sequencing. Prepared library was sequenced using Ion 520/530 Templating/Sequencing kits and instrumentation (Thermo Fisher Scientific, Inc.). See FIG. 7. Performance (e.g., yield, uniformity) with the instant panel indicates the technology is able to use the designer pipeline and effectively generate sequencing data for both strands of DNA. See FIG. 6A-6C and Table 1.

### Example 7

[0432] Primers were designed using the composition design approach provided herein and targeted to a wide variety of oncology target sequences. Forward and reverse adaptors described above were utilized comprising

Forward Adaptor:
SEQ ID NO: 1
------A Handle----- ------*UT*------ --Gene Specific--
TCTGTACGGTGACAAGGCG-U-NNNACTNNNTGA-U-GAGGACCGUCGCTUGGT
Rev Adaptor C
SEQ ID NO: 3
TCTAGTCGGTCAGTCACGG-U-NNNACTNNNTGA-U-CCTTCTGCAUGGTATTCTTTCTCTUCC
-----C Handle------- ------UT------- -------Gene Specific-------

TABLE 2A
Family Generation, Coverage, and Uniformity

| | | | AmpliSeq HD | | | | |
|---|---|---|---|---|---|---|---|
| | | | Median Read | | Median # | | Median # |
| | | | Counts | Uniformity | Families | Molecular | Families |
| Sample | Input | | per Target | (U50) | Size >= 3 | Conversion | Size >= 3 |
| cfDNA 2016B | 20 | ng | 61,939 | 95.9% | 5794 | 48% | 5794 |
| | | | 63,679 | 95.9% | 5879 | 49% | 5879 |
| cfDNA 416G | 20 | ng | 79,004 | 98.6% | 7676 | 64% | 7676 |
| | | | 61,694 | 98.6% | 7322 | 61% | 7322 |
| 0.5% fMM | 6000 | copies | 61,458 | 98.6% | 5466 | 46% | 5466 |
| | | | 62,019 | 98.6% | 5685 | 47% | 5685 |
| 0.1% fMM | 6000 | copies | 70,397 | 98.6% | 6278 | 52% | 6278 |
| | | | 60,879 | 98.6% | 5946 | 50% | 5946 |
| gDNA | 292 | copies | 22,650 | 97.3% | 340 | 57% | 340 |
| | | | 79,746 | 98.6% | 354 | 59% | 354 |

TABLE 2B
Sensitivity, Specificity, and FPs/lib, Hot Spots Only

| | | | AmpliSeq HD | | |
|---|---|---|---|---|---|
| Sample | Input | | Sensitivity (%) | Specificity (%) | FP |
| cfDNA 2016B | 20 | ng | | 100.00 | 0 |
| | | | | 99.70 | 1 |
| cfDNA 416G | 20 | ng | | 100.00 | 0 |
| | | | | 100.00 | 0 |
| 0.5% allelic | 6000 | copies | 100.0 | 100.00 | 0 |
| Frequency | | | 100.00 | | 0 |
| 0.1% allelic | 6000 | copies | 85.14 | 100.00 | 0 |
| Frequency | | | 94.60 | 100.00 | 0 |
| gDNA | 292 | copies | | 100.00 | 0 |
| | | | | 100.00 | 0 |

[0433] With target sequences specific to targets as in Table D and adaptors each comprise 4096 unique tag sequences for each gene specific target sequence, resulting in an estimate of 16,777,216 different unique tag combinations for each gene specific target sequence pair. Samples containing 19.8 ng of cell free DNA and 0.2 ng of total RNA were processed as described in example 1D, starting with the optional reverse transcriptase step. Total RNA for some samples listed contained 5 spiked in fusion constructs. See Table D. Prepared library was sequenced using Ion 520/530 Templating/Sequencing kits and instrumentation (Thermo Fisher Scientific, Inc.). Performance (e.g., yield, uniformity, molecular conversion, sensitivity) with the instant panel indicates the technology can efficiently convert input DNA into library and detect mutations present at frequencies as low as 0.1% to 0.5%. See Table 2A-2B. Additionally, results confirm the technology can efficiently convert input DNA and cDNA into library and detect fusions present at frequencies of ˜1%. See Table 3A-3B.

TABLE 3A
Fusions

| | | |
|---|---|---|
| LRIG3-ROS1 | EZR-ROS1 | KLC1-ALK |
| CCDC6-RET | GOPC-ROS1 | SDC4-ROS1 |
| CD74-ROS1 | HIP1-ALK | SLC34A2-ROS1 |
| CUX1-RET | KIF5B-ALK | TPM3-ROS1 |
| EML4-ALK | KIF5B-RET | TPR-ALK |

TABLE 3B
Family Generation, Coverage, and Uniformity (No Activation)

| Sample | Input | FP | U50 | Conversion |
|---|---|---|---|---|
| cfDNA 5022 | 10 ng | 0 (343) | 98.5 | 44% |
| cfDNA 5022 + | 10 ng | 0 (343) | 99.25 | 51% |
| total RNA | | 2 (323) | | |
| cfDNA 5022 + | 10 ng | 0 (343) | 98.5 | 50% |
| Trifusion | | 1 (323) | | |
| gDNA | 10 ng | 0 (343) | 93.98 | 45% |
| | | 2 (323) | | |
| gDNA + | 10 ng | 0 (343) | 93.98 | 54% |
| total RNA | | 0 (323) | | |
| gDNA + | 10 ng | 1 (343) | 95.49 | 53% |
| Trifusion | | 1 (323) | | |

### Example 8

[0434] Primers were designed using the composition design approach provided herein and targeted to genes using those of short tandem repeats (STRs), which are useful for high resolution genotyping and analysis of complex mixtures. Forward and reverse adaptors described above were utilized comprising

Forward Adaptor:
SEQ ID NO: 1
------A Handle----- ------*UT*------ --Gene Specific--
TCTGTACGGTGACAAGGCG-U-NNNACTNNNTGA-U-GAGGACCGUCGCTUGGT
Rev Adaptor E
SEQ ID NO: 5
TGACAAGGCGTAGTCACGG-U-NNNACTNNNTGA-U-CCTTCTGCAUGGTATTCTTTCTCTUCC
-----E Handle------- ------UT------- -------Gene Specific-------

[0435] With target sequences specific to targets as in Table E and adaptors each comprise 4096 unique tag sequences for each gene specific target sequence, resulting in an estimate of 16,777,216 different unique tag combinations for each gene specific target sequence pair. Samples containing 1 to 10 ng of genomic DNA were processed as described in example 1D without the optional reverse transcriptase step. Prepared library was sequenced using Ion 520/530 Templating/Sequencing kits and instrumentation (Thermo Fisher Scientific, Inc.). Performance (e.g., yield, uniformity) with the instant panel indicates that even challenging STR targets (which are often shortened by 1 or more repeats during amplification) can be efficiently converted into a library. Results were consistent across titration levels of input DNA. See Table 4. When results were compared to standard operating procedure according to manufacturer instructions using Torrent Suite Molecular Diagnostics plugin to evaluate the same targets, results generated using compositions and methods provided herein yielded more consistent signal over each of the repeat regions, with less stutter (data not shown).

TABLE 4

| | | Median | | Half-Double | 80% |
|---|---|---|---|---|---|
| | | Read | Median # | Uniformity | Uniformity |
| Barcode | Input | Counts per | Families | (Families | (Families |
| Name | DNA | Target | Size >= 3 | Size >= 3) | Size >= 3) |
| BC_0102 | 1 ng | 37,727 | 257 | 77.78% | 63.89% |
| BC_0105 | 2 ng | 35,056 | 412 | 83.33% | 63.89% |
| BC_0108 | 5 ng | 32,478 | 1021 | 80.56% | 69.44% |
| BC_0120 | 10 ng | 30,915 | 1646 | 86.11% | 63.89% |

### Example 9

[0436] Primers were designed using the composition design approach provided herein and targeted to oncology genes target sequences as described above in Example 6, where two primer pairs were utilized in library amplification (to put the two universal sequences on each end of amplicons, e.g., an A-universal handle and a P1-universal handle on each end) to enable bi-directional sequencing. Library preparation was carried out on samples containing spiked in AOHC control as described according to methods of Example 1E above without optional RT step. See FIG. 7. Prepared library was sequenced using Ion 520/530 Templating/Sequencing kits and instrumentation (Thermo Fisher Scientific, Inc.), then analyzed separately for unidirectional sequence results as well as results analyzed from bidirectional sequencing. Performance (e.g., yield, uniformity, sensitivity) with the instant panel indicates the technology is able to use the designer pipeline and effectively generate sequencing data for both strands of DNA, and bidirectional sequence analysis results in reduction of indel False Positives measured. See Table 5.

TABLE 5

| | Bidirectional, | Bidirectional, |
|---|---|---|
| | Analyzed | Analyzed |
| | Unidirectional | Bidirectional |
| True Positives | 67 | 67 |
| Sensitivity | 91.8 | 91.8 |
| TP in SNP, INDEL | 65; 2 | 65; 2 |
| False Negatives | 6 | 6 |
| False Positives in SNP, INDEL | 1:2 | 1:0 |

### Example 10

[0437] For each of the Ion barcode adaptors, a single barcode is included in an A adapter. Addition of a second set of barcodes on the P1 adapter can effectively reduce the level of contamination artifacts in results by filtering out identified contamination reads. Primers were designed using the composition design approach provided herein and targeted to a wide variety of oncology target sequences. Samples containing 20 ng of genomic DNA were processed similarly to those described in Example 7 above and using the method of example 1D, however, additionally barcoded P1 adapters were also utilized, wherein a barcode 12mer sequence was inserted into the P1 adapter sequence of the reverse adaptor. Sample containing genomic DNA for library preparation was processed with barcode 8 in both A and P1 adapters. Additional samples were also processed with barcodes 1, 2, 3, 4, 5, 6, 7 and 9 (each in both P1 and A barcoded adapters), but without genomic DNA. Performance (e.g., yield, uniformity, Conversion) with the instant panel indicates that additional barcodes can effectively identify contamination. See Table 6.

TABLE 6

| Reverse Barcode | Reads Detected | % Total |
|---|---|---|
| bc1 | 332 | 0.001% |
| bc2 | 54 | 0.000% |
| bc3 | 261 | 0.001% |
| bc4 | 481 | 0.001% |
| bc5 | 9,908 | 0.019% |
| bc6 | 8,532 | 0.016% |
| bc7 | 2,656 | 0.005% |
| bc8 | 52,089,480 | 99.941% |
| bc9 | 1,403 | 0.003% |
| bc10 | 7,131 | 0.014% |

### Example 11

[0438] In another specific implementation, adaptors were prepared as described in example 2A for targets of the ONCOMINE™ Focus Assay, as in Table B, as well as described in example 6 with target sequences specific to targets as in Table D and adaptors each comprise 4096 unique tag sequences for each gene specific target sequence, resulting in an estimate of 16,777,216 different unique tag combinations for each gene specific target sequence pair. Forward and reverse adaptors utilized comprising

Forward Adaptor:
SEQ ID NO: 1
------A Handle------ ------*UT*---- ---Gene Specific--
TCTGTACGGTGACAAGGCG-U-NNNACTNNNTGA-U-GAGGACCGUCGCTUGGT
Rev Adaptor I:
SEQ ID NO: 1705
TGACAAGGCGTAGTCACGG-U-NNNACTNNNTGA-U-CCTTCTGCAUGGTATTCTTTCTCTUCC
-----T Handle---------------*UT*---- -------Gene Specific-------

[0439] Preparation of library was carried out according to the method described above for 1F. See also FIG. 8. The workflow has been adapted to use amplification primers to enable libraries to carry out sequencing runs on the Illumina platform. The design (shown schematically in FIG. 8) contains: (1) P5 grafting primer region; (2) P5 index (A-H) region; (3) P5 sequencing/index read primer region; (4) A-handle region; (5) UT region; (6) gene specific insert; (7) UT region; (8) I-handle region; (9) P7 sequencing/index read primer region; (10) P7 index (1-12) region; and (11) P7 grafting primer region. 3 libraries were made with an oncology panel comprising targets of Table D having idex5-01-idex7-5, idex5-02-index7-6 and idex5-7-idex7-7 respectively. 2 libraries were made with Focus panel comprising targets of Table B having idex5-01-idex7-5, and idex5-7-idex7-7 respectively. See Table F. All libraries are made with 19.6 ng of g24385 with 0.4 ng spike-in AOHC so we could detect 0.1% allele frequency.

TABLE F

| Name | Sequence (5′ to 3′) | SEQ ID |
|---|---|---|
| 5-01-Ah | AATGATACGGCGACCACCGAGATCTACAC AGCGCTAG TCGTCGGCAGCGTC | 1706 |
| | AGATGTGTATAAGAGACAG TCTGTACGGTGACAAGGCGT | |
| 5-02-Ah | AATGATACGGCGACCACCGAGATCTACAC GATATCGA TCGTCGGCAGCGTC | 1707 |
| | AGATGTGTATAAGAGACAG TCTGTACGGTGACAAGGCGT | |
| 5-07-Ah | AATGATACGGCGACCACCGAGATCTACAC ACATAGCG TCGTCGGCAGCGTC | 1708 |
| | AGATGTGTATAAGAGACAG TCTGTACGGTGACAAGGCGT | |
| 5-08-Ah | AATGATACGGCGACCACCGAGATCTACAC GTGCGATA TCGTCGGCAGCGTC | 1709 |
| | AGATGTGTATAAGAGACAG TCTGTACGGTGACAAGGCGT | |
| 5-09-Ah | AATGATACGGCGACCACCGAGATCTACAC CCAACAGA TCGTCGGCAGCGTC | 1710 |
| | AGATGTGTATAAGAGACAG TCTGTACGGTGACAAGGCGT | |
| 5-010-Ah | AATGATACGGCGACCACCGAGATCTACAC TTGGTGAG TCGTCGGCAGCGTC | 1711 |
| | AGATGTGTATAAGAGACAG TCTGTACGGTGACAAGGCGT | |
| 5-013-Ah | AATGATACGGCGACCACCGAGATCTACAC AACCGCGG TCGTCGGCAGCGTC | 1712 |
| | AGATGTGTATAAGAGACAG TCTGTACGGTGACAAGGCGT | |
| 5-014-Ah | AATGATACGGCGACCACCGAGATCTACAC GGTTATAA TCGTCGGCAGCGTC | 1713 |
| | AGATGTGTATAAGAGACAG TCTGTACGGTGACAAGGCGT | |
| 01-Ih | AATGATACGGCGACCACCGAGATCTACAC AGCGCTAG TCGTCGGCAGCGTC | 1714 |
| | AGATGTGTATAAGAGACAG TGACAAGGCGTAGTCACGGT | |
| 02-Ih | AATGATACGGCGACCACCGAGATCTACAC GATATCGA TCGTCGGCAGCGTC | 1715 |
| | AGATGTGTATAAGAGACAG TGACAAGGCGTAGTCACGGT | |
| 5-07-Ih | AATGATACGGCGACCACCGAGATCTACAC ACATAGCG TCGTCGGCAGCGTC | 1716 |
| | AGATGTGTATAAGAGACAG TGACAAGGCGTAGTCACGGT | |
| 5-08-Ih | AATGATACGGCGACCACCGAGATCTACAC GTGCGATA TCGTCGGCAGCGTC | 1717 |
| | AGATGTGTATAAGAGACAG TGACAAGGCGTAGTCACGGT | |
| 5-09-Ih | AATGATACGGCGACCACCGAGATCTACAC CCAACAGA TCGTCGGCAGCGTC | 1718 |
| | AGATGTGTATAAGAGACAG TGACAAGGCGTAGTCACGGT | |
| 5-010-Ih | AATGATACGGCGACCACCGAGATCTACAC TTGGTGAG TCGTCGGCAGCGTC | 1719 |
| | AGATGTGTATAAGAGACAG TGACAAGGCGTAGTCACGGT | |
| 5-013-Ih | AATGATACGGCGACCACCGAGATCTACAC AACCGCGG TCGTCGGCAGCGTC | 1720 |
| | AGATGTGTATAAGAGACAG TGACAAGGCGTAGTCACGGT | |
| 5-014-Ih | AATGATACGGCGACCACCGAGATCTACAC GGTTATAA TCGTCGGCAGCGTC | 1721 |
| | AGATGTGTATAAGAGACAG TGACAAGGCGTAGTCACGGT | |
| 7-1-Ah | CAAGCAGAAGACGGCATACGAGAT ATATTCAC GTCTCGTGGGCTCGG | 1722 |
| | AGATGTGTATAAGAGACAG TCTGTACGGTGACAAGGCGT | |
| 7-2-Ah | CAAGCAGAAGACGGCATACGAGAT GCGCCTGT GTCTCGTGGGCTCGG | 1723 |
| | AGATGTGTATAAGAGACAG TCTGTACGGTGACAAGGCGT | |
| 7-3-Ah | CAAGCAGAAGACGGCATACGAGAT ACTCTATG GTCTCGTGGGCTCGG | 1724 |
| | AGATGTGTATAAGAGACAG TCTGTACGGTGACAAGGCGT | |
| 7-4-Ah | CAAGCAGAAGACGGCATACGAGAT GTCTCGCA GTCTCGTGGGCTCGG | 1725 |
| | AGATGTGTATAAGAGACAG TCTGTACGGTGACAAGGCGT | |
| 7-5-Ah | CAAGCAGAAGACGGCATACGAGAT AGTAGAGA GTCTCGTGGGCTCGG | 1726 |
| | AGATGTGTATAAGAGACAG TCTGTACGGTGACAAGGCGT | |
| 7-6-Ah | CAAGCAGAAGACGGCATACGAGAT GACGAGAG GTCTCGTGGGCTCGG | 1727 |
| | AGATGTGTATAAGAGACAG TCTGTACGGTGACAAGGCGT | |
| 7-7-Ah | CAAGCAGAAGACGGCATACGAGAT AGACTTGG GTCTCGTGGGCTCGG | 1728 |
| | AGATGTGTATAAGAGACAG TCTGTACGGTGACAAGGCGT | |
| 7-8-Ah | CAAGCAGAAGACGGCATACGAGAT GAGTCCAA GTCTCGTGGGCTCGG | 1729 |
| | AGATGTGTATAAGAGACAG TCTGTACGGTGACAAGGCGT | |
| 7-9-Ah | CAAGCAGAAGACGGCATACGAGAT AATTCTGC GTCTCGTGGGCTCGG | 1730 |
| | AGATGTGTATAAGAGACAG TCTGTACGGTGACAAGGCGT | |
| 7-10-Ah | CAAGCAGAAGACGGCATACGAGAT GGCCTCAT GTCTCGTGGGCTCGG | 1731 |
| | AGATGTGTATAAGAGACAG TCTGTACGGTGACAAGGCGT | |
| 7-1-Ah | CAAGCAGAAGACGGCATACGAGAT ATCTTAGT GTCTCGTGGGCTCGG | 1732 |
| | AGATGTGTATAAGAGACAG TCTGTACGGTGACAAGGCGT | |
| 7-12-Ah | CAAGCAGAAGACGGCATACGAGAT GCTCCGAC GTCTCGTGGGCTCGG | 1733 |
| | AGATGTGTATAAGAGACAG TCTGTACGGTGACAAGGCGT | |
| 7-1-Ih | CAAGCAGAAGACGGCATACGAGAT ATATTCAC GTCTCGTGGGCTCGG | 1734 |
| | AGATGTGTATAAGAGACAG TGACAAGGCGTAGTCACGGT | |
| 7-2-Ih | CAAGCAGAAGACGGCATACGAGAT GCGCCTGT GTCTCGTGGGCTCGG | 1735 |
| | AGATGTGTATAAGAGACAG TGACAAGGCGTAGTCACGGT | |
| 7-3-Ih | CAAGCAGAAGACGGCATACGAGAT ACTCTATG GTCTCGTGGGCTCGG | 1736 |
| | AGATGTGTATAAGAGACAG TGACAAGGCGTAGTCACGGT | |
| 7-4-Ih | CAAGCAGAAGACGGCATACGAGAT GTCTCGCA GTCTCGTGGGCTCGG | 1737 |
| | AGATGTGTATAAGAGACAG TGACAAGGCGTAGTCACGGT | |
| 7-5-Ih | CAAGCAGAAGACGGCATACGAGAT AGTAGAGA GTCTCGTGGGCTCGG | 1738 |
| | AGATGTGTATAAGAGACAG TGACAAGGCGTAGTCACGGT | |
| 7-6-Ih | CAAGCAGAAGACGGCATACGAGAT GACGAGAG GTCTCGTGGGCTCGG | 1739 |
| | AGATGTGTATAAGAGACAG TGACAAGGCGTAGTCACGGT | |
| 7-7-Ih | CAAGCAGAAGACGGCATACGAGAT AGACTTGG GTCTCGTGGGCTCGG | 1740 |
| | AGATGTGTATAAGAGACAG TGACAAGGCGTAGTCACGGT | |
| 7-8-Ih | CAAGCAGAAGACGGCATACGAGAT GAGTCCAA GTCTCGTGGGCTCGG | 1741 |
| | AGATGTGTATAAGAGACAG TGACAAGGCGTAGTCACGGT | |
| 7-9-Ih | CAAGCAGAAGACGGCATACGAGAT AATTCTGC GTCTCGTGGGCTCGG | 1742 |
| | AGATGTGTATAAGAGACAG TGACAAGGCGTAGTCACGGT | |
| 7-10-Ih | CAAGCAGAAGACGGCATACGAGAT GGCCTCAT GTCTCGTGGGCTCGG | 1743 |
| | AGATGTGTATAAGAGACAG TGACAAGGCGTAGTCACGGT | |
| 7-11-Ih | CAAGCAGAAGACGGCATACGAGAT ATCTTAGT GTCTCGTGGGCTCGG | 1744 |
| | AGATGTGTATAAGAGACAG TGACAAGGCGTAGTCACGGT | |
| 7-12-Ih | CAAGCAGAAGACGGCATACGAGAT GCTCCGAC GTCTCGTGGGCTCGG | 1745 |
| | AGATGTGTATAAGAGACAG TGACAAGGCGTAGTCACGGT | |

[0440] To mimic low level of mutant variants (0.10%) presence in DNA samples, we used purified genomic DNA and spiked in small quantity of AcroMetrix Oncology Hotpot Control plasmid. These samples are used as our control samples for the purpose of demonstrating the library preparation method and assessing the sensitivity and specificity for low levels mutant variants detection by this assay method. Bioanalyzer results matched library structure designs, and yield and purity of libraries were on par with those prepared on other methods described above. Similar successful sequencing results were generated with each of the adaptor pairings.

[0441] A MiSeq sequencing run successfully generated clusters, and produced sequencing and indexing reads. Sequencing results of the panel run on the Illumina MiSeq indicate similar performance as compared to the standard AmpliSeq HD version run on the Ion S5 using a 540 chip. See Table 7.

TABLE 7

| | MiSeq | S5 540 |
|---|---|---|
| Raw Read Accuracy (%) | 99.31 | 99.27 |
| Mapped Reads | 12,994,280 | 17,855,575 |
| Mean Depth | 46,674 | 62,429 |
| On-Target (%) | 98.91 | 98.64 |
| coverageAnalysis Uniformity (%) | 97.86 | 97.98 |
| Half-Double Uniformity (%) | 86.62 | 83.64 |
| 0.1% MegaMix TP | 140 | 138 |
| 0.1% MegaMix FN | 11 | 13 |
| 0.1% MegaMix FP | 58 | 38 |

[0442] While preferred embodiments of the present invention have been shown and described herein, it will be obvious to those skilled in the art that such embodiments are provided by way of example only. Numerous variations, changes, and substitutions will now occur to those skilled in the art without departing from the invention. It should be understood that various alternatives to the embodiments of the invention described herein may be employed in practicing the invention. It is intended that the following claims define the scope of the invention and that methods and structures within the scope of these claims and their equivalents be covered thereby.

TABLE A

| Primer | | Primer Sequence | Primer | | Primer Sequence |
|---|---|---|---|---|---|
| Name | SEQ ID | (target of primer A) | Name | SEQ ID | (target seq of primer B) |
| F1 | 8 | GCTCCCAGGCACUTGATGAUAC | R1 | 104 | ACAGAAUCACAUGCCACACAGT |
| F2 | 9 | TGTTGCCATTUCAGGGTTTCUGA | R2 | 105 | TTCCTTCUAAAAGGCCATGAAGATCUG |
| F3 | 10 | ACCAAUGCGAGGAAGAAAAACAAUC | R3 | 106 | TCTGAAGAACAUGTGUGAGCACA |
| F4 | 11 | TCTTCAGAAUCTTGTTGGCUGCAT | R4 | 107 | CCCAACCCACAUTTCCTTTATAGATGTUT |
| F5 | 12 | AGAGTTGCAUCCTTCCCTTCUCT | R5 | 108 | TGTTCCAACAGGAUCTGUCCAAAA |
| F6 | 13 | CTGGCAUGACGCAGTTTCTUC | R6 | 109 | CCAGTGTCTGUCCTTGCCTTUC |
| F7 | 14 | GATCAAAGAGACGAAGUCTCTUGCA | R7 | 110 | CUATGACAAGAAAAUGGACACCAACAAG |
| F8 | 15 | CTTGCCUAGACAGCACCGUAAT | R8 | 111 | AGGAGGAUAAAGACCTGGUCCAT |
| F9 | 16 | TGGTTTCTGGUGGGACCATTAUG | R9 | 112 | GTCCTCUGGATCTCTTCAUGCA |
| F10 | 17 | TTGAAAGAGAACACACUTACTCUCCAC | R10 | 113 | CTGAGACATTCCUATGTCCTGCUC |
| F11 | 18 | CTCTACCAGAGUTAATCAACTGAUGCA | R11 | 114 | TUGAUACAAAACAAGCCCACGAACT |
| F12 | 19 | TATCAACTGTCCUTGTTGGCAAAUCA | R12 | 115 | CCAGCCTAATCTUGTTTTTCTTATGTTCUG |
| F13 | 20 | GCAAATGACTUGCTATTATTGAUGGCA | R13 | 116 | GTTATAGATGGUGAAACCTGTTTGTUGG |
| F14 | 21 | GTGGGATCATAUTCATCTACAAAGUGGT | R14 | 117 | GATTACTGGTTUCCAACAGGTTCTUG |
| F15 | 22 | GGAGGTCAUGGCATCGAGUT | R15 | 118 | TATGGTCTUGGACATCCAGGAUCT |
| F16 | 23 | GTGAGGCAGUCTTTACUCACCT | R16 | 119 | TAGGAAATGCAUTTCCTTTCTUCCCA |
| F17 | 24 | GGGAAATGUGAGCCCTUGAGAT | R17 | 120 | CCTGTGGCUGTCAGTATTUGGA |
| F18 | 25 | ACTCTTGCUCCTTCCATCCTUG | R18 | 121 | GTTCATCCUGCTGGAGCUCAT |
| F19 | 26 | CCCAAUGCAGCGAACAATGTUC | R19 | 122 | GTAGCTGCTGAAAAUGTAACTTTGTAUCC |
| F20 | 27 | GATCAGGGCUTCCAUGAGGAAA | R20 | 123 | ACTCTGTAGGCUGCAGTTCUCA |
| F21 | 28 | CTCAAGAGUGAGCCACTTCTUACC | R21 | 124 | CTCCTCTTGUCTTCTCCTTUGCA |
| F22 | 29 | AGAATAAAACACAUACAAGTTGGAAATTTCUGG | R22 | 125 | CTTGTGAGTGGAUGGGTAAAACCUAT |
| F23 | 30 | ACCUGAGCCAAGGACTTTUACC | R23 | 126 | CGGACTGAAAGUATAACCTTCTTCTTUCC |
| F24 | 31 | TGTCAATTAGCUGGAACATCUGAAACT | R24 | 127 | GCATGTGAACAUTCTGCTTTTCAUGG |
| F25 | 32 | GTGCCCTATUACCTCAATCAUCCT | R25 | 128 | ACGCCTTCACCUTTAACACCUC |
| F26 | 33 | CCAGACAGAAAAGCGGCUGTUA | R26 | 129 | ACTTGGGAGGUATCCACAUCCT |
| F27 | 34 | CCTAGTAGAATGTTUACTACCAAATGGAAUGA | R27 | 130 | AGATTCATCTUGAAGAAGTTGAUGGAGG |
| F28 | 35 | TTTTTGAUGAAACAAGACGACTTTGUG | R28 | 131 | GAATAGGATATTGUATCATACCAATTTCUCGAT |
| F29 | 36 | CACAGCUACACCATATATGAAUGGAGA | R29 | 132 | CAGCATTTGACTTUACCTTATCAATGTCUC |
| F30 | 37 | GATCTATGTUCGAACAGGTATCUACCATG | R30 | 133 | ACTGCTAAACACTAAUATAACCTTTGGAAAUAT |
| F31 | 38 | GGGAAGAAAAGUGTTTTGAAATGTGTUT | R31 | 134 | CATTTTTCCAGATACUAGAGTGTCTGTGUA |
| F32 | 39 | TTTGAATCTTUGGCCAGTACCUCA | R32 | 135 | CATAAGAGAGAAGGUTTGACTGCCAUAAA |
| F33 | 40 | GACTAGCUAGAGACAATGAATUAAGGGAAAA | R33 | 136 | GAATCTCCATTTUAGCACTTACCTGUGA |
| F34 | 41 | CTGAGATGCACAAUAAAACAGTUAGCC | R34 | 137 | AGAATGTCAGTUAAGTTAATGAGCTTTUCCAT |
| F35 | 42 | GACAUTCUCAAACAGGAGAAGAAGGA | R35 | 138 | GCTTGATUCCAAGGACCATGATCUG |
| F36 | 43 | TCTTTTCTCAAGUTGGCCTGAAUCA | R36 | 139 | CAATTCCCAAAAUGAAGGTAGCUACAC |
| F37 | 44 | CAATCTTTTGAUGACATTGCATACATUCGA | R37 | 140 | GGAAGATCCAAUCCATTTTTGTTGUCC |
| F38 | 45 | GTATGCAGGCAUCCTCAGCUA | R38 | 141 | CGGGAAGCGGGAGAUCTUG |
| F39 | 46 | CUGGUGACCGAGGACAACGT | R39 | 142 | GGCGTCCUACTGGCAUGA |
| F40 | 47 | GTCCUGGGAGTCUCAGGACA | R40 | 143 | CCTUCAGCAGCTUGAAGAGCT |
| F41 | 48 | CCAGTTACCUGTCCTGGTCAUT | R41 | 144 | GGAAACTCCCAUCTTGAGTCAUAAGG |
| F42 | 49 | AGTGAAAAACAAGCUCTCATGTCUGA | R42 | 145 | CATGTGTCCAGUGAAAATCCUCACT |
| F43 | 50 | GGAAAAATTGUGAAGATCTGTGACTTUGG | R43 | 146 | CTGACTUTAGAGATTAAAGUGAAGGAGGAT |
| F44 | 51 | AGCACTCTGACAUATGGCCATUT | R44 | 147 | CCTGGACAAAAAUACCAATCTATTGUGG |
| F45 | 52 | GGCACGGTUGAATGTAAGGCTUA | R45 | 148 | ACTGATATGGUAGACAGAGCCUAAACAT |
| F46 | 53 | CCCACAGAAACCCAUGTAUGAAGT | R46 | 149 | ACTGACCAAAACUCAGCCTGUT |
| F47 | 54 | TUGACAGAACGGGAAGCCCUCAT | R47 | 150 | CCTGACAGACAAUAAAAGGCAGCUT |
| F48 | 55 | CCTTACTCAUGGTCGGAUCACAA | R48 | 151 | GTTGAAACUAAAAATCCTTUGCAGGACT |
| F49 | 56 | CCAATATTATGGAUCCCAACTGCCUA | R49 | 152 | ACATTCTGAAGCAGCUTGGAGTUT |
| F50 | 57 | GCTACTTTGAUTTCTCCACTUCCAAC | R50 | 153 | GAGGAGATTGAAAAUCTTCCTGCCUT |
| F51 | 58 | AAAGGCAUGGAGCATCTGUACA | R51 | 154 | TTGGTCCGUCTCCUCCACGG |
| F52 | 59 | GTTATGTCCUCATTGCCCUCAACA | R52 | 155 | CTTCAGTCCGGUTTTATTTGCATCAUAG |
| F53 | 60 | CGAGGGCAAAUACAGCTTUGGT | R53 | 156 | GACTCTCCAAGAUGGGATACUCCA |
| F54 | 61 | TGATGGAGAUGTGATAATTUCAGGAAACA | R54 | 157 | CGGTGACTUACTGCAGCTGTUT |
| F55 | 62 | GAGACATGCAUGAACATTTTTCUCCA | R55 | 158 | TCCAGACCAGGGUGTTGTTTUC |
| F56 | 63 | GCCTCTUACACCCAGUGGAGAA | R56 | 159 | TGTGCCAGGGACCUTACCTTAUA |
| F57 | 64 | CCTTCTCUCTCTGTCAUAGGGACT | R57 | 160 | CACAGCAAAGCAGAAACUCACAUC |
| F58 | 65 | CTCCAGGAAGCCUACGTGAUG | R58 | 161 | TGTGTUCCCGGACATAGUCCA |
| F59 | 66 | CAGGAACGUACTGGUGAAAACAC | R59 | 162 | GAAAATGCUGGCTGACCUAAAGC |
| F60 | 67 | GCTTGTAAGUGCCCGAAGTGUA | R60 | 163 | CACAACCCACUGAGGTATATGTATAGGUAT |
| F61 | 68 | CGCAGTGCUAACCAAGTTCTTUC | R61 | 164 | CCATGGTTAAATAAAAUGCCACTTACTGUT |
| F62 | 69 | CAGTCAAGGUTGCTGATTTUGGT | R62 | 165 | CTTGGTGGUAAACTTTTGAGTTUGCA |
| F63 | 70 | CGAATCGCUACCCTGCTGUT | R63 | 166 | CCAAGCCUCATGGUGCCAT |
| F64 | 71 | TACCGAUACCGUGCGGG | R64 | 167 | TACUGGCAGCAAGUGCCCAG |
| F65 | 72 | CTGTCCUCCACAGGCATTTTUG | R65 | 168 | CCCTCACUCACAGCACATAGUC |
| F66 | 73 | CCATCCCUGACTGTGAGAUCAA | R66 | 169 | CCAGGUACGCCTCCAGAUGA |
| F67 | 74 | TCAGTGGAAAAAUAGCCTCAATTCTUACC | R67 | 170 | CTTCATGAAGACCUCACAGTAAAAAUAGGT |
| F68 | 75 | TATTATGACTUGTCACAATGUCACCACAT | R68 | 171 | GACTCGAGTGAUGATTGGGAGATUC |
| F69 | 76 | TTCCUTAGTCTTTCTTUGAAGCAGCA | R69 | 172 | AGATGCTCUGAGAAAGGCATUAGAAAG |
| F70 | 77 | TCTGACUCCACGAGAACTTGAUCATA | R70 | 173 | TATTGTTAACCUTGCAGAATGGUCGA |
| F71 | 78 | CAAGGCAUAAAAGCTGGGAAAUAGG | R71 | 174 | CUACCTGCCUACGCAACAAGAT |
| F72 | 79 | GGCTAUGGCACCUGCAACT | R72 | 175 | GGGACCUCAGATGTGCTGTUG |
| F73 | 80 | CCACAGAUCCACTGUGCGAC | R73 | 176 | GTGGCTTGUGGGCAAACTUG |
| F74 | 81 | CCATCCTGACCUGGTATGGUCA | R74 | 177 | CCTGCTUCAGGACGTTGAACUC |
| F75 | 82 | CAGCTCGTUCATCGGGACUT | R75 | 178 | ACCTGGCUCCTCTTCACGUA |
| F76 | 83 | CCTCCTTCCUAGAGAGTTAGAGUAACT | R76 | 179 | CACCCACACUTACACATCACTTUG |
| F77 | 84 | CACTGTGTTACUGCCATCGACTUA | R77 | 180 | TCGAGATTUAGCAGCCAGAAATGTUT |
| F78 | 85 | GATTCAATCAAACUGCAGAGTATTUGGG | R78 | 181 | TGATCTGGUGTCAGAGAUGGAGAT |
| F79 | 86 | GGCTTCTTGGUCGTGTTCTUCA | R79 | 182 | CUAGCGCCUGGAAGAGAAAAGGAGAT |
| F80 | 87 | CCCAGCGUCCTCAAAAGTUACA | R80 | 183 | CCCTCCACAAUCATTCCTGUGT |
| F81 | 88 | CTCTACGUCTCCUCCGACCA | R81 | 184 | CTTATTTATTGGTCUCTCATTCTCCCAUCC |
| F82 | 89 | CCTGTACTGGUGGATGTCCUCA | R82 | 185 | GCCTGTUGGACATCCTGGAUAC |
| F83 | 90 | CGCCAGGCUCACCTCTAUAG | R83 | 186 | AGGAGCGAUGACGGAATAUAAGC |
| F84 | 91 | TGTCTTTGCUGATGTTTCAAUAAAAGGAA | R84 | 187 | AGTTAAGGACTCUGAAGATGTACCTAUGG |
| F85 | 92 | CATGTACTGGUCCCTCATUGCA | R85 | 188 | GTAATAATCCAGACUGTGTTTCTCCCUT |
| F86 | 93 | TACCTCTATTGTUGGATCATATTCGUCCA | R86 | 189 | TATTATAAGGCCUGCTGAAAATGACUGAAT |
| F87 | 94 | CAGACACTGUACAAGCTCUACGA | R87 | 190 | GAAUAAAGAGGAGCAGGTUGAGGAA |
| F88 | 95 | CTCTGUCACAGTGGATUCGAGA | R88 | 191 | CAACATGACGAAGAUGGCAAACTUC |
| F89 | 96 | TCCUTCCATAGUGACCAAGACCA | R89 | 192 | GGGTACAUACAAAGCAGTCTGUGT |
| F90 | 97 | GGTTCCATUGGTAGCTGGUGAT | R90 | 193 | GCCCATTTTTATCUACTTCCATCTTGUCA |
| F91 | 98 | TGTAAAGAGACAGCCUTTCCTCUGA | R91 | 194 | AGTTCACAAAUCCATCAATGTTGCUC |
| F92 | 99 | ACACUCTUGAGGGCCACAAAG | R92 | 195 | TGTGATTGUAGGGTCTCCCTUGAT |
| F93 | 100 | CCGCTCCUTGTAGCCAAUGA | R93 | 196 | GGGTCUGACGGGTAGAGUGT |
| F94 | 101 | CCACUTUGGAACAGGACCAAC | R94 | 197 | TCAAAGTCGTCAUCCTTCAGTTCUC |
| F95 | 102 | CTTTCTTCCACCUTTCTCCAGCUA | R95 | 198 | CATCGCTGUAGAACGCACCAUA |
| F96 | 103 | TCAAGCCCUCCAACATCCUAGT | R96 | 199 | GGAAACTTCTGTUCATACCGACATGUAG |

TABLE B

| Primer | | Primer Sequence | Primer | | Primer Sequence |
|---|---|---|---|---|---|
| Name | SEQ ID | (target seq of Primer A) | Name | SEQ ID | (target seq of Primer B/C/D/E) |
| F97 | 200 | GAGGTCGTATUCGTCCACAAAAUGGT | R97 | 469 | GAGGCAGGAGACCCUGUAGGAG |
| F98 | 201 | GAAACTGCTTAGUAACTAGCAGAAGTGTUC | R98 | 470 | GAGGATAUATGCCAUACCCCAGCAAA |
| F99 | 202 | GACAAAGTTGUGTGTTGTAAGUGGAACA | R99 | 471 | GACCAAGAAAGGCUTGTGTCTACATTTUT |
| F100 | 203 | GAGCACCAATCUTTCTTCTGCCTTTUG | R100 | 472 | GACCAAAUCAAGAAACCTGTTUGAGAGAA |
| F101 | 204 | GAGGGAUCCCAAGGAAGAGAAGUGA | R101 | 473 | GACACTTCCCUTGTGGGAATGUCAA |
| F102 | 205 | GAGCTACTCTCCUGAACTCTCTCACUC | R102 | 474 | GATGCATCAGAACCCUCCTTGAAUC |
| F103 | 206 | GACTCCCAGUTGCAACGTUAGGT | R103 | 475 | GAGGUCCACGGAUCCAGAAACAAG |
| F104 | 207 | GATCACGUGTCCCCCTUCCA | R104 | 476 | GAGGTTCCTCCUCTCCTGGTCUC |
| F105 | 208 | GAACATTTGGCUGTGACTTCUAAGAAGAAA | R105 | 477 | GAGCTCACTAACUAACGTGAAAGCCTUAC |
| F106 | 209 | GAGATGAUCCAGATGTUAGGGCAGT | R106 | 478 | GAGGTTTTGCACAAGUTAGGTTTGTTTUG |
| F107 | 210 | GAGCCCAAATUGATTTCGATGATCTUCA | R107 | 479 | GAACCTTTATATCGTUACTCTGAATCTTATCTUCC |
| F108 | 211 | GAGCTCAAGAGUGAGCCACTUCT | R108 | 480 | GATGACTCTGTCUCCTCTTGTCTTCUC |
| F109 | 212 | GAATTAACACACAUCAGTGGAACTTCUGT | R109 | 481 | GAAAACGTTTTUCACCTTAGCATTTUGT |
| F110 | 213 | GAGCAAUCCAAAAGAAUAGCAGCCAAA | R110 | 482 | GACACCATCUCCATATCATUGAGACCAAAT |
| F111 | 214 | GACTTTGTGGAAUAGCCCATGAAGAGUA | R111 | 483 | GACGACAGACUACTTTGGTTCTCTTTUGT |
| F112 | 215 | GAACAGGAAGAGCACAGUCACTTUG | R112 | 484 | GACTCACUGACAAGCTCCUCGT |
| F113 | 216 | GACCATGCAGAGUGAAAGGATAUCCC | R113 | 485 | GAGCCTTTTCTTUTGCTTCCCTTGUT |
| F114 | 217 | GATGGAGCCGCUGACACCUA | R114 | 486 | GACAGGACCUGGCCCUGAC |
| F115 | 218 | GAGGTGUCTAGCCCAUGGGAGAA | R115 | 487 | GACCCAUCACACACCATAACUCCAC |
| F116 | 219 | GAGTCTGGUCCACATTGCTCUCA | R116 | 488 | GAGCTGUCCCCTCACCATUCAG |
| F117 | 220 | GAGCAAGAGUACACACTCCTCATTUGG | R117 | 489 | GATCACAACCCACUGAGGTATATGTAUAGG |
| F118 | 221 | GACTGGTTTCUGGTGGGACCATUA | R118 | 490 | GACAUGCACCGGAAAAGCGAUG |
| F119 | 222 | GACTCCCAGGCACUTGATGATACUC | R119 | 491 | GACATTTCTAGGUTACAGGCCUGGAT |
| F120 | 223 | GAGGGCTUGGTAACGTCCUGT | R120 | 492 | GACTCCAUGCCCCTCACUCA |
| F121 | 224 | GATGTGTCAAGGAGUTCGAAGATUCAC | R121 | 493 | GAATTGAAAATCUTCCTGCCTUCCCT |
| F122 | 225 | GAGUACAGCCAGTGTGUCCGA | R122 | 494 | GAGCAAAAGTGGUCCTCTCTGAAUCT |
| F123 | 226 | GACCATCCGGGCUTTACGCAAAUA | R123 | 495 | GAATATCAUCCAGCCTGTGTCTTUCC |
| F124 | 227 | GACCCCACUGAACCTCTCTTACATUT | R124 | 496 | GAGAGGGAAGGCAGGAUCTCUAAC |
| F125 | 228 | GACCCUAACAGCCATGCTTTCUC | R125 | 497 | GACCAGGCAAUGGAAAGGGTACAUA |
| F126 | 229 | GACGGCGAUGCTGAGAACCAAUA | R126 | 498 | GAGAAUAAAGAGGAGCAGGTUGAGGAA |
| F127 | 230 | GACCGACGUTGACCGCAUC | R127 | 499 | GAGGGCAAAUGAGCCTCUCAGT |
| F128 | 231 | GAAAATATTUCAGTGTCCGTUCACACACAA | R128 | 500 | GATCCAGATTGAUCTTGGGAGTGUAAAAA |
| F129 | 232 | GACCACACUGACGTGCCTCUC | R129 | 501 | GAGTCTTTGTGUTCCCGGACAUAGT |
| F130 | 233 | GAGCGCCACAGAGAAGUTGTUGA | R130 | 502 | GAGGGTCUGACGGGTAGAGUGT |
| F131 | 234 | GACCACAAAAUGGATCCAGACAACUGT | R131 | 503 | GAGCTTGCTCTGAUAGGAAAATGAGATCUA |
| F132 | 235 | GAACTGTTTCGTAUTTATAGCTGATTTGAUGGA | R132 | 504 | GACCTCTTCCUCAGGATTGCCTUT |
| F133 | 236 | GACCTCAUTGCCCUCAACACAGT | R133 | 505 | GATCAGTCCGGTUTTATTTGCATCATAGUT |
| F134 | 237 | GACACCACGUACCAGATGGAUGT | R134 | 506 | GACCCAAAGACUCTCCAAGATGGGAUA |
| F135 | 238 | GAAGACATGCAUGAACATTTTTTCUCCAC | R135 | 507 | GATCCAGACCAGGGUGTTGTTTUC |
| F136 | 239 | GATGUGGAGCCTCTUACACCCA | R136 | 508 | GAGTGCCAGGGACCUTACCTTAUAC |
| F137 | 240 | GAACGTCTTCCUTCTCTCTCTGUCA | R137 | 509 | GACTGAGGUTCAGAGCCAUGGA |
| F138 | 241 | GAGAATGTGAAAAUTCCAGTGGCCAUC | R138 | 510 | GAGUCATATCUCCCCAAACCCCAAT |
| F139 | 242 | GAGGGTGTGUGGTCTCCCAUAC | R139 | 511 | GAGCCATAGGGCAUAAGCTGTGUC |
| F140 | 243 | GAGGATGAGCUACCTGGAGGAUGT | R140 | 512 | GACCTTGGTCCUTCACCTAACCTUG |
| F141 | 244 | GAGGTCACTGUACACCTTACACAUGAA | R141 | 513 | GACCCTCUTTAGCCAUGGCAAGG |
| F142 | 245 | GACATCACUGTAAACCTUGCAGACAAAC | R142 | 514 | GATGGTCTCUCATTCTCCCAUCCC |
| F143 | 246 | GAGCTTCTTGGUCGTGTTCTTCAUT | R143 | 515 | GACTCCTCCUGTGATCTGCAAUCT |
| F144 | 247 | GAUGGAAGCCCAGCCATTUCTAAA | R144 | 516 | GAGATGAUGAAGATGATUGGGAAACACAAG |
| F145 | 248 | GAGCCCCUGAGCGTCAUCT | R145 | 517 | GAGGGCTGUGCGTCACTGUA |
| F146 | 249 | GAGAGCTGGUGGAGGCUGA | R146 | 518 | GAGGAGCCCAGGCCUTTCUT |
| F147 | 250 | GAGUGACCGAGGACAACGUGAT | R147 | 519 | GAGCGTCCUACTGGCAUGACC |
| F148 | 251 | GACTCUGGGAGATCTUCACGCT | R148 | 520 | GACCACUCACAGGTCGTGUGT |
| F149 | 252 | GAGGATTGCAGAUTGGGCCTUG | R149 | 521 | GAACATGATGGAUGTCACGTTCUCAAA |
| F150 | 253 | GAATAATCCAUTGCCTGTCUAAAGAACACT | R150 | 522 | GATGTTAACCUTGCAGAATGGUCGAT |
| F151 | 254 | GAGACTTGGUGTTGTTGAUGGCAAA | R151 | 523 | GACUGCAGGATTCCUACCGGAA |
| F152 | 255 | GACCAACAUGACTTACTTGAUCCCCAT | R152 | 524 | GAATCACCAAAUGGCACCAUACGA |
| F153 | 256 | GAACCCUGGCCTACCTGGUC | R153 | 525 | GAAGTTCAAGCUGAAGAAGATGUGGAA |
| F154 | 257 | GATGAAGCAGCAAGUATGAUGAGCAA | R154 | 526 | GACTGACACCUAGCTGTGATCCUG |
| F155 | 258 | GAGGCACGGTUGAATGTAAGGCTUA | R155 | 527 | GAACTGATATGGUAGACAGAGCCUAAACAT |
| F156 | 259 | GACCACACCCUGTTCACTCCTUT | R156 | 528 | GAGTCTCAGTCAUTAGAGCACTCUGG |
| F157 | 260 | GAAAGGTGATCUATTTTTCCCTTTCUCC | R157 | 529 | GATTTCATACUGACCAAAACUCAGCCT |
| F158 | 261 | GAGCTTTTTGCUAAAATGCATGTTUCCAA | R158 | 530 | GAGACACGGCUTTACCTCCAAUG |
| F159 | 262 | GACAAAGAATGGUCCTGCACCAGTAAUAT | R159 | 531 | GAAGGCCTGCUGAAAATGACTGAATAUAA |
| F160 | 263 | GATCCTCATGUACTGGTCCCTCAUT | R160 | 532 | GAGTAAAAGGUGCACTGTAATAAUCCAGACT |
| F161 | 264 | GACAGATCTGTATUTATTTCAGTGTTACTUACCT | R161 | 533 | GAGACTCTGAAGAUGTACCTATGGTCCUA |
| F162 | 265 | GACATGTCAACAUCGCTCTAATUCAGAGA | R162 | 534 | GAGCTTTUCAAAAGGCTUAAACACAGGAT |
| F163 | 266 | GATGTTACGCAGUGCTAACCAAGUT | R163 | 535 | GAGCAAACCACAAAAGUATACTCCAUGGT |
| F164 | 267 | GAGCTGAUTTTGGTCTUGCCAGAG | R164 | 536 | GATCTGACTTGGUGGTAAACTTTTGAGUT |
| F165 | 268 | GACCTCACCTCUATGGTGGGATCAUAT | R165 | 537 | GAGTTCTTGCUGGTGTGAAATGACUG |
| F166 | 269 | GATTCGCCTGUCCTCATGTATUGG | R166 | 538 | GACACCCCCAGGAUTCTUACAGAAAA |
| F167 | 270 | GAGCACUGGGACTTTGGTAATUCAC | R167 | 539 | GACATCTCTUGGAAACTCCCATCTUGA |
| F168 | 271 | GACAGTGAAAAACAAGCUCTCATGTCUG | R168 | 540 | GACCACATGUGTCCAGTGAAAAUCCT |
| F169 | 272 | GACAGTGTGUCCACCGTGAUCT | R169 | 541 | GAAGTGAAGGAGGAUGAGCCUGA |
| F170 | 273 | GATGGAATGCCAGAACUACAATCTTTUGAT | R170 | 542 | GAGTGGAAGATCCAAUCCATTTTTGTTGUC |
| F171 | 274 | GAGACGCAUTTCCACAGCUACAC | R171 | 543 | GAAGCATCAGCAUTTGACTTTACCTTAUCA |
| F172 | 275 | GAGCTTTGAAUCTTTGGCCAGUACCT | R172 | 544 | GACATAAGAGAGAAGGUTTGACTGCCAUA |
| F173 | 276 | GAGATGCAGCCAUTGACCTGTTUAC | R173 | 545 | GAAGAAAACCATUACTTGTCCATCGUCT |
| F174 | 277 | GAGGGATUAAAGCTGGCTAUGGCA | R174 | 546 | GACCTTGTUGGGACCTCAGAUGT |
| F175 | 278 | GAAGCAUACGCAGCCTGUACC | R175 | 547 | GAGTGGUAGCAGTGGAUGCAGAA |
| F176 | 279 | GAGCTUCCAGGAGCGATCGTUT | R176 | 548 | GAAGGCCCCAUACAATTTGAUGACA |
| F177 | 280 | GAAGCTCGTUCATCGGGACTUG | R177 | 549 | GACCATGGUGCACCUGGGAT |
| F178 | 281 | GACTGGTUACTGAAAGCUCAGGGAT | R178 | 550 | GAACTTTGCGUGGTGTAGATATGAUCAA |
| F179 | 282 | GAGGACTCTGUGAGTGGGATTTGTTUT | R179 | 551 | GAGTCTTCACUCACCTCGGAUGA |
| F180 | 283 | GACATCCCUGACTGTGAGAUCAAGAA | R180 | 552 | GACAGGUACGCCTCCAGAUGAG |
| F181 | 284 | GAATCAACCUGCTTGGTGTCUG | R181 | 553 | GAAACUCCCGCAGGTTUCCCT |
| F182 | 285 | GAACGAGGACCUGTGGGACUC | R182 | 554 | GAGTGCCTUGCCCTTTTTGUGG |
| F183 | 286 | GACATUCCCCAACAGCTGUGGT | R183 | 555 | GACCGGGAUGCCAGGAUACG |
| F184 | 287 | GACCTTCCUCCTGAAGGCCUGA | R184 | 556 | GAGGGCUGTACCTCCUCAGAGA |
| F185 | 288 | GAAAGTGCUTGTGCCCUGCAT | R185 | 557 | GAACAGGCUGCCCAAGGGCUA |
| F186 | 289 | GACCCCTCTUGGACCTTAGAUGC | R186 | 558 | GACAGUGATCAGAUGAGCAGCAG |
| F187 | 290 | GACGCAUGGAGAAGAAACTGCAUG | R187 | 559 | GAACGGUCTUGGAACCCAGAGA |
| F188 | 291 | GATCCCCTAUGTGCAAGTCCUAAAG | R188 | 560 | GAGCTATTGAUGTCTGCAGTCUGG |
| F189 | 292 | GACCACTGUGCAGAAGCTCUCC | R189 | 561 | GATUGACTUGCCGGAAGAGCCT |
| F190 | 293 | GACGCCGGCCUCGTGAGUC | R190 | 562 | GAAGACCUCCGAGTCACTCCUG |
| F191 | 294 | GACAAATGCUGAAAGCTGTACCAUACC | R191 | 563 | GAAAAAGACTCGGAUGATGTACCTAUGG |
| F192 | 295 | GATGAGGCAGUCTTTACTCACCUG | R192 | 564 | GATTCCTTTCTUCCCAGAGACATUGC |
| F193 | 296 | GAGCAAAGACUGGTTCTCACUCACC | R193 | 565 | GAACATCCCUCTCTGCTCUGCA |
| F194 | 297 | GACGAUCTGTTCUACACGGAACCC | R194 | 566 | GAGGCTGGTTAUTGAAACCTTGTTTUACAT |
| F195 | 298 | GACCAGACAAGCCUACAGTAGGAAUC | R195 | 567 | GACTACCCCCGUACCAAGUACAAAC |
| F196 | 299 | GACTCCACAGACCCUCTCCTUGC | R196 | 568 | GATCGUCGAAGCGGCUGAC |
| F197 | 300 | GAAGGGTGTCUCTCTGTGGCTTUA | R197 | 569 | GAGACTCTGUAGGCTGCAGTTCUC |
| F198 | 301 | GAGTTTCUGCAGATTGACTUGCACA | R198 | 570 | GACTTCTTCCUACCTGTTTCCCAUGAC |
| F199 | 302 | GATCAGGAAACAAAAAUTTGTGCTAUGCAA | R199 | 571 | GAGGACCCAUTAGAACCAACUCCAT |
| F200 | 303 | GAGCTGGAGGAGCUAGAGCTUGAT | R200 | 572 | GAGGCTTGUGGGAGACCTUGAAC |
| F201 | 304 | GAGGGCTGUCGTGGTAGACTUAGA | R201 | 573 | GACCTGGTAGTCUCAAGCAGATGTTAAUG |
| F202 | 305 | GAAAGACTTCUCAAATTGTTGCCATTUCAG | R202 | 574 | GAAACGGACATGAGUTTGTTTTCCTTCUA |
| F203 | 306 | GACGAGGAAGAAAAACAAUCCCACTUG | R203 | 575 | GACAGCCAACAAGAUTCTGAAGAACAUG |
| F204 | 307 | GAGAGATCCTTUCGAAGTCATCGTCUT | R204 | 576 | GATCCCTAGGUAGCTAACCCCUAC |
| F205 | 308 | GAGGGCAAUGTCAATTAGCUGGAAC | R205 | 577 | GAAAAACACGGCAUGTGAACATTCUG |
| F206 | 309 | GACACTGTGTTACUGCCATCGACTUAC | R206 | 578 | GAGTATTCAUCGAGATTUAGCAGCCAGA |
| F207 | 310 | GACTTTTACCCUCTTCAGCTCAGTTUCT | R207 | 579 | GAGAGAGAGGACUGACTATCGGACUG |
| F208 | 311 | GATCTCCTCCAACCUAATAGTGTATUCACA | R208 | 580 | GAGACTGUCAAGCAGAGAATGGGUAC |
| F209 | 312 | GATTTCGUAAGTGTTACUCAAGAAGCAGAA | R209 | 581 | GAGAATAGGATATTGUATCATACCAATTTCUCGAT |
| F210 | 313 | GAATGCCCCCAAGAAUCCTAGUAGAA | R210 | 582 | GAACGAAAATGUAAGAAGATTCATCTUGAAGAAG |
| F211 | 314 | GAAGAGATGATTGUTGAATTTTCCTTTUGGG | R211 | 583 | GAAAAGCCATTTTUCCAGATACTAGAGUGT |
| F212 | 315 | GACGGAACUCGAATCGCUACCCT | R212 | 584 | GAGGGUCCCCAAGACACCUACG |
| F213 | 316 | GACTCGATGCUGTTCCCAGGUAC | R213 | 585 | GACCGAGAACUGAGGGTGGUACA |
| F214 | 317 | GATCATACAGACACUTCATTTGGAGUACC | R214 | 586 | GATACTAGAACUCAAAACACTGGCTGUT |
| F215 | 318 | GAAAAAATAAAGCTUGGCTTCAAGTTGUCT | R215 | 587 | GAGTAAGTCTTCACUTTCAGATTTTAGTUGGG |
| F216 | 319 | GAACATTGTGACCUTAATTTTGTGATCTCTUG | R216 | 588 | GATGCTTCCTGGUCTTTAGGATTTCUT |
| F217 | 320 | GACCCCACTCAUGTTTAGCAGATGUA | R217 | 589 | GATTTTACTTCUGCTTGGTGGCAUG |
| F218 | 321 | GAGGACAGGUTTTGTTGTUGAGGAAG | R218 | 590 | GATTTTACCCTCAUGGCTTAGTAGCATTATUT |
| F219 | 322 | GAAGCAAGGTCAUAAATTATTCTCCATATTTUCCA | R219 | 591 | GAAAAAATATUCATCCAGCTUCAGGAAAAGG |
| F220 | 323 | GATCTTTTTACCTUATAGATGGGAAACAUGAGAG | R220 | 592 | GAATCAGTCUGGTGGATGGGUAACA |
| F221 | 324 | GAATGTGTCTTTCAUGAGAAAAACAAGATCAUT | R221 | 593 | GACTAATAATGAATAAUTGGGTATGAGGCUACAGT |
| F222 | 325 | GATAGTAGCTGAUCCACAGAAGTTCAGUA | R222 | 594 | GATGTGAGAGAGCAAUCAAGGAGUG |
| F223 | 326 | GAAAGACTCTGAAUACCACCATCAAGAATAAUAAA | R223 | 595 | GAGTCTGAGAGUAGAAGGCAGATTCTGUA |
| F224 | 327 | GAATCTACAGGCCAAUGGTTCCTUC | R224 | 596 | GAAACTTUGCGGAGATCUGAAAACCA |
| F225 | 328 | GAGCCAGTAGUCACAAAGATTTCTUACCA | R225 | 597 | GACTCTAAAGAAGGAAGUGAGAACTTCUCC |
| F226 | 329 | GAAGAAGAUTGGGUGGGCAGAC | R226 | 598 | GACTTTCTTCACUCAAAGTGCCTATTTUGAC |
| F227 | 330 | GAAACCACTGATACAUTTTTCTACTTTCCUGAA | R227 | 599 | GATTCTTTTGAGAACUGAGTGATTTAUGACCT |
| F228 | 331 | GAAGACTTCTTUGAGATATTTCCATAGCUCAC | R228 | 600 | GAAGAAGTUAGAAACAGAACTGTATGUAAGCAT |
| F229 | 332 | GACATTTTTGTTTATGUTATTCTCTCTACCUCAGC | R229 | 601 | GAGCTATACGAACTUAGAAGTGAGAAATAATCUT |
| F230 | 333 | GAAGTTATAGGTAAUCGATGCATATAGCTCAUCT | R230 | 602 | GATTTCTCCAGGUCCAAAATGAATAACTATTUGA |
| F231 | 334 | GAAATTGTTTGTAGGGUTGGTTATTAGTGACUAT | R231 | 603 | GAATCCAGGAUAGGAAGCACACAUG |
| F232 | 335 | GACCACTATGUAAGACAAAGGCUGGT | R232 | 604 | GATTTTATAACTAGATUTTCCTTCTCTCCATUCC |
| F233 | 336 | GAGTTTCTGUAGCCCATACTTTGGAUGA | R233 | 605 | GAAATTCATACAUTTTTCTCTAACUGCAAACAT |
| F234 | 337 | GACACTGUGAAGGCCCTTTCTTCUG | R234 | 606 | GAGCAGTTGUGAGATTATCTTTTCAUGGC |
| F235 | 338 | GAGCATAGGAGATAAUCATAGGAATCCCAAAUT | R235 | 607 | GATGTTTTTCTAAUGTGTTAAAGTTCATUGGAAC |
| F236 | 339 | GAAGTCACTGGAAUTGTTGGGCUAC | R236 | 608 | GACCATGACTGUCACAGTGACCUT |
| F237 | 340 | GACTUCCAGGAGCCGUAGAGTTT | R237 | 609 | GATTGUGGCCCAAACAAAGCUC |
| F238 | 341 | GAACTCTTCCTATTUTTGTAGTGACCTGTUT | R238 | 610 | GAGTGCTTGGAAAUGGAATGGTTTUAGAAT |
| F239 | 342 | GATTCCTGAUAAAGCACAGCTGTAGUG | R239 | 611 | GACTACTGUAACCAAGAGGTGACTUCAG |
| F240 | 343 | GATTGTUCAAGCAGCGAGUCC | R240 | 612 | GAAGCCGAUATCCCUGCAGAC |
| F241 | 344 | GACATGAACUACCTGGACCGCUT | R241 | 613 | GAGTCGGUGTAGAUGCACAGCT |
| F242 | 345 | GAGGTGCTGUCTGGGAAGAUGT | R242 | 614 | GATGCCCAAGGUACTGCAUGGT |
| F243 | 346 | GAAAAGAGGCAGUAGCATCTTCUCC | R243 | 615 | GACUCACGCCUAAACCAGAACC |
| F244 | 347 | GAAATCCTGGAGCUTTGGTGTCTAATUC | R244 | 616 | GATAGCTGGCUCCGCACCUT |
| F245 | 348 | GATGCAGAAGCGGUTTCTGUG | R245 | 617 | GACTGCUGGGCGCCGUAAC |
| F246 | 349 | GAGCCTCAGAGAUAAAGGCAAAGATUG | R246 | 618 | GAACCCACACAAGCGAAUCTCUG |
| F247 | 350 | GAACCATTATTTCTTUGTTTTGTTTTTCCTGUAT | R247 | 619 | GAACTTTGCUGCCTTAATGACATUCC |
| F248 | 351 | GATACCAACCAAGUTTCATUAACCACAGT | R248 | 620 | GAGGTACCUGAGATGGAGGAGUC |
| F249 | 352 | GACCATGTTGGUCACTTACTCAAAGATTUT | R249 | 621 | GATTGAGCCACUAAGCAGTAACCATUC |
| F250 | 353 | GAAATGGGCAAGGUATGGATGUGG | R250 | 622 | GACCCGAAGUTCTTCTGCAGUCC |
| F251 | 354 | GATGGCGCAUCAGATCCTAGTUT | R251 | 623 | GAGCCGAAACGAUCAAGGUGAGT |
| F252 | 355 | GATGTAACAACCUAAAGGGAATAGGAAGAAUG | R252 | 624 | GATCAGTAGAAAGAUGGTACCAAAAUGGGT |
| F253 | 356 | GAGGCACTGGUTCTCATTCCUG | R253 | 625 | GAGACCGAGCUCGGGTGUAT |
| F254 | 357 | GAATGACTCAAUACCAACCCCUCCA | R254 | 626 | GAGCCTTTGTGGUCATGGGAAAGTAUA |
| F255 | 358 | GACATAACCATGAUATTAATAGGACTCCUGCT | R255 | 627 | GAATTTGCCTGAAATUACACATAGAACTTTCUG |
| F256 | 359 | GATGAACGCAAAACCUGTTGAAGTUAAAA | R256 | 628 | GAGGGATGGGUGACTGAGAUGGT |
| F257 | 360 | GACTTAAAAATGTCAAUATCTGGCCTCAAAUACG | R257 | 629 | GAGTGGACAUGCGAAUGGAGGA |
| F258 | 361 | GAGGGAAGCAATUTGCTACACTTTAATTUAAAC | R258 | 630 | GATTTACTCTGACAGCUAAATGAACTCAAATGUA |
| F259 | 362 | GAACAGAAGCUTCTAATCCUCAACGT | R259 | 631 | GAAGGCTCAGAACACUTTACTGAATTTUG |
| F260 | 363 | GAAGTTGAUGCCAATTCACAAUCACCA | R260 | 632 | GATTACTTAGAAGAAAAUTGCTCCTTGUCAGA |
| F261 | 364 | GACTGAGGTCTATUCACTTTCTTTTCATCTTUG | R261 | 633 | GAGTGAAGGAAACCAUTCGTGAUAAAGC |
| F262 | 365 | GACTATTTGTTTCTUCCCCATGGAATTGUC | R262 | 634 | GAGAAAATUGGACCCAGTTCTCUGCT |
| F263 | 366 | GATAATCTTUGAACTGCCTGUGCACT | R263 | 635 | GAATCTTTCAACUGTAAAATTCACTGUGGGT |
| F264 | 367 | GAAAGCAAUGGCTTGGGAAGUAAGA | R264 | 636 | GACCATTCTCAUATCCTAGGTCUGCCT |
| F265 | 368 | GATCTAAAGGTTTTTCUGATTTCCTCATTAGGAUT | R265 | 637 | GAGCACUCCATTTUGGACAGCAA |
| F266 | 369 | GATCCAGTCATTTUGAGAAAGACAACTUACT | R266 | 638 | GAGTTTATTTTCTGGUTTCAATAGAACAAGTUGA |
| F267 | 370 | GATTCATTAATATTTUCAGATCACCAGTTGATUG | R267 | 639 | GATTTGAAAGGTAGAUTGCCATAATGTATCATUG |
| F268 | 371 | GAATTAACTGTACCUCCAACTTTCTTACTATAUGC | R268 | 640 | GAATGTGGAATCTUTGTTTAGTTTTACTCUGGT |
| F269 | 372 | GATTAAGAAACUAGAAACTGTTTAGACUGCCT | R269 | 641 | GAATGGTTTAGTCUGACACATATTTAACACUT |
| F270 | 373 | GATGGTTCTGUCGACTAAACUGC | R270 | 642 | GATTTTCAAGTTAUAGAAACATGTCATGTTGUCA |
| F271 | 374 | GAACGGACACUATGTCCTTAAGCUGA | R271 | 643 | GACTAGACTTUGAGACCTGCTAAATAATUAGATG |
| F272 | 375 | GATTGGCAUGGCTTCTCUAGCT | R272 | 644 | GACAGGUCCAAGUGAACCAGGGA |
| F273 | 376 | GACACCTTCUACCGCTCACUGC | R273 | 645 | GAAGGGCACUGACCCTGGUA |
| F274 | 377 | GAATTGACUCTGAATGUCGGCCAA | R274 | 646 | GATCTGCAGGAGGGUGCTCTUA |
| F275 | 378 | GACTCTGCCCCUAAGAAACCUGGA | R275 | 647 | GAGGGCAACUACACCTGCATUGT |
| F276 | 379 | GAATTACTCUAACTTTCGCAUGCACAC | R276 | 648 | GATGCCAAGACAGUGAAGTTCAAAUG |
| F277 | 380 | GAAGUGGGCAGCAGTTTCUGA | R277 | 649 | GAGACACCACCUACTTCTCCGUCA |
| F278 | 381 | GAAACCAACTGCUTGTATGCTTTCUGG | R278 | 650 | GAAAGACCAAAAGAGAAUGGAAAGTACUGAC |
| F279 | 382 | GAGCAGCCUTACCTGGTUGGA | R279 | 651 | GAAGAGUATCCATCUCCAGGAGACG |
| F280 | 383 | GATTACAGCUCGTTGGUGCAGT | R280 | 652 | GATGTGGCUCTCCGCCCAUT |
| F281 | 384 | GAATGGAAACCCUGACAGAGTCTTUG | R281 | 653 | GAGCTACACCATUAGCTTCACTGATTUT |
| F282 | 385 | GATGTTATGAGCUTAGCACCTUGCAG | R282 | 654 | GACTGGATGGUAAGAGGAGTTTCTTCAUC |
| F283 | 386 | GACCAGTTCUGCAGTTAGAGGTUG | R283 | 655 | GACCTTTCCCCUCCCCTACCUAG |
| F284 | 387 | GATTTGATTCTTAAUCACCTAAGGAUGGCT | R284 | 656 | GACAAAACAAAGUCAAAGAGAATTATGAAATGUG |
| F285 | 388 | GAATCCGTACCUTCCACCAATCUG | R285 | 657 | GACAGGGATTTUGGTTACTACTTTGCUAAGA |
| F286 | 389 | GATATAACAATGAAUGACCAAAAGGAAATUAACAA | R286 | 658 | GATTGTCTTCUGGACACGTTCUGAAA |
| F287 | 390 | GATAACTTTCCATAUGCAAACCTACTGGCUA | R287 | 659 | GATATTAAGCTTTCUTGGAAAATTCTCTTUCCCT |
| F288 | 391 | GACCUGGACGTCTUGGAAAAGGG | R288 | 660 | GATTCAGAAGTUAGGAAAGGAGUCCAG |
| F289 | 392 | GATCTGGGUCAAGGAUGGCACA | R289 | 661 | GACACCUGUCACCCGCACAC |
| F290 | 393 | GAGCCCACUTCCCATCUGGGT | R290 | 662 | GACAGTCAGUAACGCCAGUGAGT |
| F291 | 394 | GATCCCCGCUGCTGUGCAAC | R291 | 663 | GAGUCCCGTGGUGCAAAGGC |
| F292 | 395 | GACCCACATGUCCAGCACCUT | R292 | 664 | GAATGTACACTAGTTUCCGGAATAAACCTTUT |
| F293 | 396 | GAGCTGGUGAAACAGGTAGUGAGT | R293 | 665 | GACTUGACCCCUGCGAGCCA |
| F294 | 397 | GACTCCAGGUCCTTGTGUGAGC | R294 | 666 | GACCCACUCAAGCTCAGCTGUAA |
| F295 | 398 | GACCTCACGAACUGTGCTGAUGG | R295 | 667 | GACTGAGAATGGCUACCTCTCGATAUG |
| F296 | 399 | GAGGATTCGAGAAGUGACAGGCTAUG | R296 | 668 | GAGGCTGGAGUTGGTGTTATAGTUCAA |
| F297 | 400 | GAATTGGTAGCUGGTGATGTTCCUC | R297 | 669 | GACTCACACATCUTGAGCCCATTTTTAUC |
| F298 | 401 | GACAGCTAATUCATCTGGAGAUCAAACCC | R298 | 670 | GACTGAGAGGGUGTCACATACCAUG |
| F299 | 402 | GATGTCAGTTCCCUCCTTTTCTATTTTCUC | R299 | 671 | GATTCATACCGACAUGTAGGACCTUGT |
| F300 | 403 | GATGGGCACGGUAATGCUGCT | R300 | 672 | GAACTTCUCACACCGCTGTGUT |
| F301 | 404 | GACTCUGCGGTGGTUGGCAT | R301 | 673 | GACCTCACCUCCGTTTCCUGCA |
| F302 | 405 | GACTCCACCUCCAGGAACTTACUC | R302 | 674 | GATCUGGCCCCCTUAGGAGGA |
| F303 | 406 | GAGGGATCTTGUGAAATGTCATCTGACUC | R303 | 675 | GATCATCCTCUCCCCATAGAAAAGUCC |
| F304 | 407 | GATCAACCCTGTUTTTCTCCCTCTTATUG | R304 | 676 | GATCTCUGCCATCATTUCCGGAAAG |
| F305 | 408 | GACTGUACAGCATGAAGUGCAAGAAC | R305 | 677 | GATGCAAGGAAUGCGATGAAGUAGA |
| F306 | 409 | GACCATTAACAUGGCCTACCAGAGUT | R306 | 678 | GAGTCGCUAACACGTGTGTGTUC |
| F307 | 410 | GATTGCCUAGACAGCACCGTAAUG | R307 | 679 | GATGGCTAAACTUGACCTTTTTACTCUGC |
| F308 | 411 | GAGACGCAGUTTCTTCTTCTCAUCG | R308 | 680 | GATTCCTCAGCAUCGACCTUGC |
| F309 | 412 | GATATCGAGTGTGUGCATATGTGTATGTUG | R309 | 681 | GAAATCTATATACTUCCTTACCTGGGATUGGA |
| F310 | 413 | GAAGGGAAAAUGACAAAGAACAGCUCA | R310 | 682 | GAACATGCTGAGAUCAGCCAAATUC |
| F311 | 414 | GAGGCCTGCUTTTGGAGTCCUAT | R311 | 683 | GAGCAGUGAAAAGAGTCUCAAACACAA |
| F312 | 415 | GAGAAGAGCCUCCACCATCUCCA | R312 | 684 | GACCCACAGGCCUTCTUCGAG |
| F313 | 416 | GACACACAUGCCATCATTCUAGGAAG | R313 | 685 | GACTGGUATGAGAAACUGCACGAGT |
| F314 | 417 | GAGAGGTTTUCCAGCACTCTGACAUAT | R314 | 686 | GAAATACCAATCUATTGTGGGCTCUGG |
| F315 | 418 | GATCTTCTCTGUTTCAGGGCAUGAAC | R315 | 687 | GACCTCCTTCUGCATGGTATTCTTUCT |
| F316 | 419 | GAAGATTCUGCCGAACCAATGGAUC | R316 | 688 | GAATTAAAGCAGUGCTCATGATUGGG |
| F317 | 420 | GATATGACTUGTCACAATGUCACCACAT | R317 | 689 | GACGGGACUCGAGTGATGATUGG |
| F318 | 421 | GAGTGCCCTATUACCTCAATCATCCUG | R318 | 690 | GACTTCACCTTUAACACCTCCAGUCC |
| F319 | 422 | GATCAGTTACTACCUGAAAATGACACTTUGT | R319 | 691 | GACTCCTCTAGCUATCTTAATGACTUGGAC |
| F320 | 423 | GATAAAGACCTUCTTCCGTGTGUCCT | R320 | 692 | GACTGCTTTCATUCATAGGGAAATACAUAAGAAA |
| F321 | 424 | GATACATTTATTTUGAGAAACTTGAGAGAACUTCA | R321 | 693 | GATTCAATATTTTAAAUAGTCTGGCCUAAACGGT |
| F322 | 425 | GAAGATGGTGATAGAUCTTTAAGAGAATTGCUT | R322 | 694 | GATGATTTCCAGUATTAATTGGCAAUAAGAGAAT |
| F323 | 426 | GAAGCTTTTGATAAGAGUTAGGAAATCACTAGUC | R323 | 695 | GAATGAAAGCUAAAACATAAGATGAAUGGGAAAA |
| F324 | 427 | GAAGGAUAAAAACCAGCATTATTTATTUGAGCA | R324 | 696 | GAATTATTTCTTACCACUTTTCCTTTCTCCUGT |
| F325 | 428 | GACTGACCCAUAATCTTGCACCATTUACC | R325 | 697 | GAATTGTGAGATUAACAGCAGGGAUACC |
| F326 | 429 | GATTTGAAATGAAUGTTCACGACAAAUGC | R326 | 698 | GAGCTTCATTGTCTUGATAAAATTTATGGTATCUT |
| F327 | 430 | GAACAACCAAAACAAUACACACAGAGATTUT | R327 | 699 | GACCAGCTCTTUCATATCTTAACATTUAGCAACA |
| F328 | 431 | GAACGGAGGGUCATGTGTATATTAAGUAAG | R328 | 700 | GAGCCAAAACATTTUGTCCCTTTCTATAATTUG |
| F329 | 432 | GAGAATTAAGUGTGTACTACUCCCAAGAGAAAA | R329 | 701 | GATGGACTTCAAGUGATCACTTGUG |
| F330 | 433 | GATATAGGATGAGUAGCTCCAAATTAATGAAUGT | R330 | 702 | GAAGCCTGUGGTGCTTTTUGCG |
| F331 | 434 | GAGCTGTAGAAUAGTCAAGAGGAATUGCA | R331 | 703 | GAAAGTCAAACUACACTCAGAACCUGAAT |
| F332 | 435 | GACTCAGTGCUCTAAATCCAGAGCUG | R332 | 704 | GAGCAAAGGCCAAAGAUAAAATGCTTACUG |
| F333 | 436 | GAATGAAATATUGTCAACTCTCTUAGGCAAAAT | R333 | 705 | GAAAGCTACAGAAUGTGAACAGTCTTCTUAAA |
| F334 | 437 | GATACTTUGCAAAGCTGAATUAGACAGCA | R334 | 706 | GAGAGGTAGAUGCTGTAATTGCTGAUACAA |
| F335 | 438 | GAACATGAGCAUCACATTTTCCTUGG | R335 | 707 | GACAAACACCTCCUGATAAATTGGCTTUG |
| F336 | 439 | GATGCCTTATGAAUATATTCACGCUGACT | R336 | 708 | GACCCTACUCCAAGGAGCUCAGG |
| F337 | 440 | GAACCAGGUAAGCACCGAAGUC | R337 | 709 | GACCCAGTUACCATAACTACTCUGAGAAAA |
| F338 | 441 | GAACCAAGCCGCUGGTUCA | R338 | 710 | GACTTGCAGAGCUATCCCCUAAAGC |
| F339 | 442 | GAAGACCCCUTTAACTCAAGACUGC | R339 | 711 | GAGCTGCACCGAGUCGTAGUC |
| F340 | 443 | GAGCGAGGAUATCTGGAAGAAATUCGA | R340 | 712 | GAGTCGUTGTCUCCCCGAAGG |
| F341 | 444 | GAUTCUCCACGGCCGACCA | R341 | 713 | GAATACAGTCCUGGATGATGATGTTTTUGA |
| F342 | 445 | GAAAGTCCCUCAAAAATAGGAGGUGCT | R342 | 714 | GAGGACAAGAAAAGUGCAACTUCCCA |
| F343 | 446 | GAGACAGAUCAGCAACAACCGAAAAUG | R343 | 715 | GATTTCATTGUTTTCCAACUCCGGGAT |
| F344 | 447 | GATTTGTCCAGAGACCUTTCTAACGTAUT | R344 | 716 | GATTUCCACAGAAACAACAUCGATTTCTTC |
| F345 | 448 | GATTTCUGAAGAGGACTTGTUGCG | R345 | 717 | GATGCATTUGATCATGCATTUGAAACAAGT |
| F346 | 449 | GAGATTTTUCAGTTAATAATAUCCCCCGAGCT | R346 | 718 | GAAGTCTGUGCGCGCTUGC |
| F347 | 450 | GAAATCGCCUCCGGAUCCC | R347 | 719 | GAGTGCGCACGUCGCAAUC |
| F348 | 451 | GAGTCATTCCTTCUTTTTAAAATGGTGCTUAAGT | R348 | 720 | GAGGATGTAUACAAAAGGCGGATGUG |
| F349 | 452 | GAGGTCCCCCACCUCTCTTTUG | R349 | 721 | GAGCCAGAGAGUCCCTTUCACC |
| F350 | 453 | GACTCUCCAGGAAGGCTCACAUC | R350 | 722 | GATGCCACTCUTTGGGTTGAGUT |
| F351 | 454 | GATGGCATUGCCTTGTCCTUG | R351 | 723 | GATTTCAAACUGGAGGCTTAUCACCAA |
| F352 | 455 | GAGGCAGAAAACCAAAACAUTGGCTUA | R352 | 724 | GAATACAAGCATGAAAAUCAAAACATATCTTCUGC |
| F353 | 456 | GAAATTGTTCCTCAAGUTTGTTTAAGGACTUAAAA | R353 | 725 | GAGTAAATGGTAGCTUTTATCATAATCACCAGUC |
| F354 | 457 | GAAGTGGTATCAUCCCCATTTAATAGCUG | R354 | 726 | GATCCATTCAAGACUTTAGCAGGTGGUA |
| F355 | 458 | GAACAAATACAAAACUGTCCACATCTATGTUG | R355 | 727 | GAGTTACTCTCATGUGAGAACCATTTGAAUGA |
| F356 | 459 | GAAACAAACCATAGCUATAATGAAGAACTTGCUA | R356 | 728 | GAGTTTTTCTTATCUCTTAAAATGTTTCTGCUACA |
| F257 | 460 | GAAATAGTTGATCAUACTTTGTAACAGAAUCACA | R257 | 729 | GAAAGGUACAAGTUAAGGCACACAGAAG |
| F358 | 461 | GACTCATCTCCCTUTAATTTTGGCACATTAUT | R358 | 730 | GATGGATCTUGGCACAATGAUAACAGG |
| F359 | 462 | GAAACTATCTUCTTTGGACTTCUGAAGAGAC | R359 | 731 | GATGCTATAGTACCAGUACCTTTTAAGGTUCA |
| F360 | 463 | GAAGTAAATAATGGTTUCTCCTTCTCTTACTTUG | R360 | 732 | GACCGTAAGGUGGCCTACTTUGC |
| F361 | 464 | GATTCCTGGUGGCATTCAAUAAAGCA | R361 | 733 | GACAGCGTTTTCUTGTATTCCTGTATTUAGC |
| F362 | 465 | GAAGGAGCAACUTAGGGATCUGGT | R362 | 734 | GAGGAACTGTGAAUGAACTTGTAGGUG |
| F363 | 466 | GAACCCCTAAUCTGGTCAACCUG | R363 | 735 | GACCUGACCAGGGCGUCAAA |
| F364 | 467 | GAAGAAATAGAAAACUACAGGACGTTAUCCAG | R364 | 736 | GAAGTTCATCTUCGAAGCTCAAATTUCAG |
| F365 | 468 | GATCCGCTTTCUAAAATGTCAGTTGUC | R365 | 737 | GATACAACAAAAUGTTTGACTTCAUGCAGGT |

TABLE C

| Primer | | |
|---|---|---|
| Name | SEQ ID | Primer Sequence |
| F366 | 738 | AAAACTCAGTAUCAACAACTACCGGUAC |
| F367 | 739 | CTCAGAAAUGGAAAAAACCTGCAGUAAA |
| F368 | 740 | GTTCCCTCUGCGTGTTCTCAUAA |
| F369 | 741 | AAGAACCTGUGTGAAAGTATCUAGCAC |
| F370 | 742 | AUAAACCAAACCCAUGCAAAAGGAC |
| F371 | 743 | GCATTGAUGGAAGGAAGCAAAUACA |
| F372 | 744 | CCAGCTTCAUAGACAAAGGTTCUCT |
| F373 | 745 | GTGGTTTCTUCCATTGACCACAUC |
| F374 | 746 | CAAAUGGGCAGGACTCTUAGGT |
| F375 | 747 | GUGAGGAAACTUCTGCAGAGGT |
| F376 | 748 | GGAAGCAGGGAAGCUCTTCAUC |
| F377 | 749 | TGGTTUGAAGAACTTTCTUCAGAAGCT |
| F378 | 750 | AGGGAGACUGUGTGTAATATTTGCG |
| F379 | 751 | GCCAGTATUGAAGAATGTTGAAGAUCAAAA |
| F380 | 752 | GCCAAAAGGAAGUCTGTTUCCAC |
| F381 | 753 | CATGCCACACAUTCTCTTTTTACAUGT |
| F382 | 754 | GTAGAGUGCTACACTGUCCAACA |
| F383 | 755 | CTCTGAGAAAGAAUGAAATGGAGTUGGA |
| F384 | 756 | AAACAAATTTUCCAGCGCTTCUGA |
| F385 | 757 | AGCAATAAAAGTGUATAAATGCCTGTAUGC |
| F386 | 758 | TCAACAAGTTGACUAAATCTCGTACTTUCT |
| F387 | 759 | CATTCTTACAUAAAGGACACTGUGAAGG |
| F388 | 760 | CCCTTACAGAUGGAGTCTTTUGGC |
| F389 | 761 | AAAGACCTTTUGGTAACTCAGACUCAG |
| F390 | 762 | ACATTCACUGAAAATUGTAAAGCCTATAATTG |
| F391 | 763 | GGTTGTGCTTTTUAAATTTCAATTTTATTTTUGCT |
| F392 | 764 | GGATGUCACAACCGUGTGG |
| F393 | 765 | AGTGAAAACUAAAATGGAUCAAGCAGATG |
| F394 | 766 | AAACTAGTTTTUGCCAGTTTTTUAAAATAACCT |
| F395 | 767 | TTTTTACCCCCAGUGGTATGUGG |
| F396 | 768 | GAAAACACAAAUCAAAGAGAAGCUGCA |
| F397 | 769 | ATATTTAGUAGCCAGGACAGUAGAAGGA |
| F398 | 770 | AAATATTTCAGUGTCCGTUCACACACAA |
| F399 | 771 | GCAGAUGCAAGGTATTCTGUAAAGG |
| F400 | 772 | ACCTACATAAAACUCTTTCCAGAATGTUGT |
| F401 | 773 | CCCTTTCTGTUGAAGCTGTCAATUC |
| F402 | 774 | AGAUGGTATGTUGCCAACACGAG |
| F403 | 775 | GATGTTTCCGUCAAATCGTGUGG |
| F404 | 776 | GTAGAACTATCUGCAGACACCUCAAAC |
| F405 | 777 | CCAGAACCACCAUCTTTCAGTAATTUG |
| F406 | 778 | ATCATAAAATGTUGGAGCTAGGTCCUT |
| F407 | 779 | TATGATGGAAGGGUAGCTGTUAGAAGG |
| F408 | 780 | GGTTAAAATGTCACUCTGAGAGGAUAGC |
| F409 | 781 | GGAAATTTGUAAAATGTGCUCCCCAAA |
| F410 | 782 | AATTCCTTGTCACUCAGACCAACUC |
| F411 | 783 | ACTAAGGTGAUGTTCCTGAGAUGC |
| F412 | 784 | ACTTTCCUTAATGTCATTTUCAGCAAAACT |
| F413 | 785 | CAGTCTGAACUACTTCTTCATATTCTUGCT |
| F414 | 786 | CTAGTTCTGCUTGAATGTTTTCAUCACT |
| F415 | 787 | TGGAATGTTCTCAUTTCCCATTTCTCUT |
| F416 | 788 | GTTTCGTUGCCTCTGAACUGAGAT |
| F417 | 789 | CCTTGATTTTCTUCCTTTTGTTCACATUCA |
| F418 | 790 | TTTCTATGCTUGTTTCCCGACUGT |
| F419 | 791 | GAUGAAAGCTCCTUCACCACAGAA |
| F420 | 792 | CCTAGAGTGCUAACTTCCAGUAACG |
| F421 | 793 | CTTGGAAGGCUAGGATTGACAAATUCT |
| F422 | 794 | TTGTTACTCTTCUTGGCTCCAGTUG |
| F423 | 795 | TTAGGTGGGCUTAGATTTCTACUGACT |
| F424 | 796 | TGCTTATAGGTUCAGCTTTCGTTTUG |
| F425 | 797 | CCACTATGUAAGACAAAGGCUGGT |
| F426 | 798 | TCCGTTTGGTUAGTTCCCTGATTTAUC |
| F427 | 799 | GTATTATCTGUGGCTCAGTAACAAAUGC |
| F428 | 800 | TTAAAGCCTCAUGAGGATCACUGG |
| F429 | 801 | AGTTCATCACTUCTGGAAAACCACUC |
| F430 | 802 | GGGATCAGCATUCAGATCTACCTTTUT |
| F431 | 803 | TTCAGCCTTTTCUACATTCATTCTGUCT |
| F432 | 804 | TACCCTGAUACTTTTCTGGAUGCCT |
| F433 | 805 | GAATCCAAACUGATTTCATCCCUGGT |
| F434 | 806 | AGCTGCCUACCACAAATACAAATTAUG |
| F435 | 807 | CAGAGTTCUCACAGTTCCAAGGTUAG |
| F436 | 808 | GAAGAAGAAGAAAACAAAUGGTTTUACCAAG |
| F437 | 809 | ATCACCACGTCAUAGAAAGTAATTGUGC |
| F438 | 810 | CATTCAAACTTACTUGCAAAATATGTGGUC |
| F439 | 811 | GCATAGGAGATAAUCATAGGAATCCCAAAUT |
| F440 | 812 | AGTTGTAGTTGTUGAATTCAGTATCAUCCT |
| F441 | 813 | TGTGCCTTTCCUAAGGAATTTGCTAAUA |
| F442 | 814 | AAAAGATAAUGGAAAGGGAUGACACAGC |
| F443 | 815 | CTGTTAAGGCCCAGUTAGATCCUC |
| F444 | 816 | AGGCAGTTCUAGAAGAATGAAAACTCUT |
| F445 | 817 | TGTACCTAGCAUTCTGCCTCAUAC |
| F446 | 818 | TAGACCTTTTCCUCTGCCCTTAUCA |
| F447 | 819 | CACATUATTACAGTGGAUGGAGAAGACA |
| F448 | 820 | CTTCTTTGGGUGTTTTATGCTTGGUT |
| F449 | 821 | GCAGAGCTUTATGAAGCAGUGAAGA |
| F450 | 822 | TCTTAAATGGUCACAGGGTTATTUCAGT |
| F451 | 823 | TTCCATTGCATCUTTCTCATCTTTCUC |
| F452 | 824 | TTCACTUCAGCAAATTTTTAGAUCCAGAC |
| F453 | 825 | TGCCCCTTUCGTCTATTTGUCAG |
| F454 | 826 | GGAGATTTTTCTGUGTTTTCTGCTAGUC |
| F455 | 827 | TGACAUACTTTGCAAUGAAGCAGAAAA |
| F456 | 828 | GGATCCTGATAUGTCTTGGTCAAGTUC |
| F457 | 829 | GGCACCAAAUACGAAACACCCAUA |
| F458 | 830 | ATATCTGTCAGTGAAUCCACTAGGACUG |
| F459 | 831 | TGAAGAAGCAUCUGAAACTGTATTTCCT |
| F460 | 832 | GGACTACTACTATAUGTGCATTGAGAGTTUT |
| F461 | 833 | TGGCTTATAAAATATUAATGTGCTTCTGTTUT |
| F462 | 834 | GGTAAAAAUGCCTATTGGAUCCAAAGAG |
| F463 | 835 | AATCTACAAAAAGUAAGAACUAGCAAGACT |
| F464 | 836 | AAGTGACAAAATCUCCAAGGAAGTTGUA |
| F465 | 837 | GAATTCTTUGCCACGTATTTCUAGCC |
| F466 | 838 | GGCTTCTTCAUTTCAGGGTAUCAAAAA |
| F467 | 839 | AATACAUACTGTTTGCUCACAGAAGGAG |
| F468 | 840 | ACCGAAAGACCAAAAAUCAGAACTAATUAAC |
| F469 | 841 | TCACAGAAUGATTCUGAAGAACCAACT |
| F470 | 842 | ATTACCCCAGAAGCUGATTCTCUGT |
| F471 | 843 | TATATGATCATGAAAAUGCCAGCACUCT |
| F472 | 844 | TTCCCATGGAAAAGAAUCAAGATGTAUG |
| F473 | 845 | ACTGTCAATCCAGACUCTGAAGAACUT |
| F474 | 846 | CAGGUGAUAAACAAGCAACCCAAGT |
| F475 | 847 | TGGCATTAGAUAATCAAAAGAAACUGAGC |
| F476 | 848 | GAATCAGGAAGUCAGTTTGAATTTACUCAG |
| F477 | 849 | GCCTGTUGAAAAATGACTGUAACAAAAG |
| F478 | 850 | TGAAGATAACAAAUATACTGCUGCCAGT |
| F479 | 851 | AGGAGGGAAACACUCAGATUAAAGAAGA |
| F480 | 852 | TTTCAGACTGCAAGGGGAAAAATAUT |
| F481 | 853 | TCTTCTTACAACUCCCTATACATTCTCAUT |
| F482 | 854 | CCAGTTGGTACUGGAAATCAACTAGUG |
| F483 | 855 | AAAAGAGCAAGGUACTAGTGAAAUCACC |
| F484 | 856 | AAAAACCTTGTTUCTATTGAGACTGUGG |
| F485 | 857 | AATTCAGCCTUAGCTTTTTACACAAGUT |
| F486 | 858 | TGACAAAAAUCATCTCUCCGAAAAACAA |
| F487 | 859 | AATAATTTTGAGGUAGGGCCACCUG |
| F488 | 860 | TCATAACTCTCUAGATAATGATGAATGUAGCA |
| F489 | 861 | GTATAGGGAAGCUTCATAAGTCAGTCUC |
| F490 | 862 | AGAAGATAGUACCAAGCAAGTCTTTUCC |
| F491 | 863 | TAGTACAGCAAGUGGAAAGCAAGUT |
| F492 | 864 | CAGGCTTCACCUAAAAACGTAAAAAUG |
| F493 | 865 | ATGAAATAUTTCTTTTUAGGAGAACCCTCAAT |
| F494 | 866 | ATATATTUTCTCCCCATUGCAGCACAA |
| F495 | 867 | AGGACATCCAUTTTATCAAGTTTCUGCT |
| F496 | 868 | TGGCTCTGATGAUAGTAAAAATAAGATTAAUGA |
| F497 | 869 | GCTGTATACGUATGGCGTTTCUAAACAT |
| R366 | 870 | TCCCGTGGCUGGTAAATCTGAAAUA |
| R367 | 871 | CCAAAACATGAAUGTTCTCAACAAGUG |
| R368 | 872 | ATTCCTGCACUAATGTGTTCATUCT |
| R369 | 873 | GUCCAAAGCGAGCAAGAGAAUCC |
| R370 | 874 | AGTTCCAGUAGTCCTACTTUGACACT |
| R371 | 875 | AGAGCACGTUCTTCTGCTGTAUG |
| R372 | 876 | AGTTGAATATCTGTTUTTCAACAAGTACATTUT |
| R373 | 877 | GCCTGGCCUGAATGCCTUAAA |
| R374 | 878 | CAATTTCAACACAAGCUAAACTAGUAGGAT |
| R375 | 879 | TCAACAAAAGUGCCAGTAGUCATTTC |
| R376 | 880 | CTGTTTTUAGCAAAAGCGUCCAGA |
| R377 | 881 | AGTCAGCCCUTGCTCTTUGAAT |
| R378 | 882 | TTGGCCAUACAAAGTGAUAAAGGACTT |
| R379 | 883 | TTTGCAGGGUGAAGAGCTAGUC |
| R380 | 884 | TGTACAAAUGGGACTAACAGGUGGA |
| R381 | 885 | AGCATACCAAGTCUACTGAATAAACACTUT |
| R382 | 886 | CCTGGAGTCGAUTGATTAGAGCCUA |
| R383 | 887 | AATGTGTTATGUGGCTCCATTATUAGCT |
| R384 | 888 | GCATTTTTACCUACGATATTCCTCCAAUG |
| R385 | 889 | ACCAGTAAAAAUAAAGAACCAGGAGUGG |
| R386 | 890 | TTATAGAGGTTTUCTACTGTTGCUGCAT |
| R387 | 891 | GCAGTTGTGAGAUTATCTTTTCAUGGC |
| R388 | 892 | CATCATTCACCCUTGGCACAGUAA |
| R389 | 893 | AAAUATTTTCTAGGAATUGCGGGAGGA |
| R390 | 894 | CAGGUAAUCGGCTCTAAAGAAACATG |
| R391 | 895 | CAGAGAGATUCGAGGCAGAGUG |
| R392 | 896 | AGTAGUGGATTTUGCTTCTCTGATATAAACT |
| R393 | 897 | GCTCTUAGCCAAAATATUAGCATAAAAATCAG |
| R394 | 898 | AAAAAGCATUGTTTTTAATCAUACCTGACTT |
| R395 | 899 | GGTACAGAUTTGTAAATCUCAGGGCAA |
| R396 | 900 | GAGAUCACGGGUGACAGAGC |
| R397 | 901 | ACCTACCTGAUACCCCAGAUCCC |
| R398 | 902 | TCCAGATTGAUCTTGGGAGTGUAAAAA |
| R399 | 903 | GTGTGCTAGAGGUAACTCATGATAAUGG |
| R400 | 904 | GAAAGGGUCAACAAAAGAATGUCCAT |
| R401 | 905 | GAAAGTTCCCCAAUTGAAAGTUGCAG |
| R402 | 906 | AACTTTGTAATUCAACATTCATCGTTGUGT |
| R403 | 907 | TAGATGATAGGUGGTACATGCACAGUT |
| R404 | 908 | ACCUGAATTATCACTAUCAGAACAAAGCA |
| R405 | 909 | GAACAGUACCCGTTCCCTUGA |
| R406 | 910 | CTTGAGGACCUGCGAAAUCCAG |
| R407 | 911 | TGGAAAGCTTCUCAAAGTATTTCATTTUCT |
| R408 | 912 | GCAGCGTTTAUAGTCTGCTTTTACAUC |
| R409 | 913 | AACGGGCTUGGAAGAAAATAAUCAAG |
| R410 | 914 | TCTGCTAGCUTGTTTTCTUCACAGT |
| R411 | 915 | AACAATATACCTUCTCAGTCTACUAGGCAT |
| R412 | 916 | CAGATAACTUAGAACAGCCTAUGGGAAG |
| R413 | 917 | GGCCAAAATUGAATGCTATGCTUAGAT |
| R414 | 918 | AGCACAATUAGCCGTAATAACATUAGAGAA |
| R415 | 919 | TGGACTCATTACUCCAAATAAACAUGGA |
| R416 | 920 | GTCTAATATCAAGCCUGTACAGACAGUT |
| R417 | 921 | TGCAGAATACAUTCAAGGTTUCAAAGC |
| R418 | 922 | AATAAATGTGUGAGTCAGTGUGCAG |
| R419 | 923 | AAGCCTTCAUCCGGAGAGTGUA |
| R420 | 924 | TAATGCUGAAGACCCCAAAGATCUC |
| R421 | 925 | GCCAAAUGAACAGACAAGUAAAAGACA |
| R422 | 926 | GCAAATTGATAGUTGTTCTAGCAGUGAA |
| R423 | 927 | CAGCAGTAUAAGCAATATGGAACUCGAA |
| R424 | 928 | GGAGCAGAATGGUCAAGTGATGAAUA |
| R425 | 929 | TTTTATAACTAGATTTUCCTTCTCTCCATUCC |
| R426 | 930 | AGAGCGTCCCCUCACAAATAAAUT |
| R427 | 931 | GAAAGAGTTCACUCCAAATCAGUAGAGA |
| R428 | 932 | GGTTCTGAUGACTCACATGAUGGG |
| R429 | 933 | CCCTGTGUGAGAGAAAAGAATGGAAUAA |
| R430 | 934 | AGGCUGAATTCTGTAAUAAAAGCAAACA |
| R431 | 935 | AGGGTAGTTCUGTTTCAAACTUGCAT |
| R432 | 936 | TGTATATTTTCAGCUGCTTGTGAATTTUCT |
| R433 | 937 | GACAGTTCTGCAUACATGTAACTAGUGT |
| R434 | 938 | GCGGAUACAACCUCAAAAGACG |
| R435 | 939 | TGUCAAGTTTCTCTUCAGGAGGAAAAG |
| R436 | 940 | AAGGAAAATAACUCTCCTGAACATCUAAAAGA |
| R437 | 941 | TGTTGAAGAGCUATTGAAAATCATTTGUGC |
| R438 | 942 | ACAGCTCAAAGUTGAACTTATTCACUAAGA |
| R439 | 943 | ATGTTTTTCTAATGUGTTAAAGTTCATUGGA |
| R440 | 944 | GCCAGTTTCCAUATGATCCATCTAUAGT |
| R441 | 945 | AGAAACCTTAACCAUACTGCCGTATAUG |
| R442 | 946 | GCCACTTTTUGGGTATCTGCACUA |
| R443 | 947 | TTCAAGAGGUGTACAGGCAUCAG |
| R444 | 948 | GGTCAGGAAAGAAUCCAAGTTTGGTAUA |
| R445 | 949 | CCTCAGCTCCUAGACTTTCAGAAATAUG |
| R446 | 950 | AAACTCCATCUCAAACAAACAAACAAATUAAT |
| R447 | 951 | CCTCCTGAATTTUAGTGAATAAGGCTUCT |
| R448 | 952 | GCAAAGCACGAACUTGCUGT |
| R449 | 953 | GTGAUGGCCAGAGAGTCUAAAACAG |
| R450 | 954 | TGACATCCCTUGATAAACCTTGTUCC |
| R451 | 955 | TTTTTGTCGCUGCTAACTGTATGTUA |
| R452 | 956 | GCTCCAACTAAUCATAAGAGATTTUAAAAGAC |
| R453 | 957 | AAGTAAGAAGGCCUGATTTGGATUCT |
| R454 | 958 | GCTATTTCCTUGATACTGGACTGUCAAA |
| R455 | 959 | ATTCCTTGAGUTTACATTAACTUACCAGAAG |
| R456 | 960 | ATGACAATTATCAACCUCATCTGCTCUT |
| R457 | 961 | TAAATTGUTTTTCTCCTGTUGAACCAGACA |
| R458 | 962 | CCTGCTTATTTUTCTCACATTCTUCCG |
| R459 | 963 | GGTTUAGAGACTTTCUCAAAGGCTTAGAT |
| R460 | 964 | GTGTTTUCACTGTCTGUCACAGAAG |
| R461 | 965 | AAAACTATCTTCUTCAGAGGTATCUACAACT |
| R462 | 966 | GTGACGUACTGGGTTTTUAGCAAG |
| R463 | 967 | GGCTTCTGATTUGCTACATTTGAAUCT |
| R464 | 968 | AGGTCTTTTTCTGAAAUATTTTGGTCACAUG |
| R465 | 969 | AGATATTGCCUGCTTTACUGCAAGAA |
| R466 | 970 | TGTATTTCCAGUCCACTTUCAGAGG |
| R467 | 971 | TTGTTTTCTTTTUCAAAGTGGATATUAAACCT |
| R468 | 972 | CAGAAGGAATCGUCATCTATAAAACTATAUGT |
| R469 | 973 | CTGTAGTTTTTCCTUATTACATTTTGCTTCUT |
| R470 | 974 | TGGGATTGAAAGUCAGTATCACTGTAUT |
| R471 | 975 | GTTACCTTTGAGCUTGTCTGACATTTUG |
| R472 | 976 | TTGGATTACTCTUAGATTTGTGTTTTGGTUG |
| R473 | 977 | ATGGTAGAGTTCUTGAAAATGGGTUC |
| R474 | 978 | GTATTTTATCTATATUCAAGGAGATGTCCGAUT |
| R475 | 979 | GCCTTTTGGCUAGGTGTTAAATTAUGG |
| R476 | 980 | GTCTACCUGACCAATCGAUGGG |
| R477 | 981 | AGCTTTTUGCAGAGCTTCAGUAGA |
| R478 | 982 | GGCCAGATAATTUAAGACATATGTTGUGC |
| R479 | 983 | GCTCCGTTTUAGTAGCAGTTAACUGT |
| R480 | 984 | GTCTGTTTCCUCATAACTTAGAATGUCCAT |
| R481 | 985 | TCACTGTGCGAAGACUTTTATGTCUA |
| R482 | 986 | TTTCACTTTGUCCAAAGATTCCTTUGC |
| R483 | 987 | AGAATTCTGCAUTTCTTTACACTTUGGG |
| R484 | 988 | GGACTGATTUGTGTAACAAGTUGCAG |
| R485 | 989 | TCATACAAATAATUTCCTACATAATCUGCAGT |
| R486 | 990 | CAATACTGGCUCAATACCAGAAUCAAGT |
| R487 | 991 | AACCTGCCAUAATTTTCGTTUGGC |
| R488 | 992 | GAAGTTTCCAAACUAACATCACAAGGUG |
| R489 | 993 | ATTTCAGAAAACACUTGTCTTGCGUT |
| R490 | 994 | ACCACATTATAUGAAAAGCCTTTTUGGG |
| R491 | 995 | GGUTTCTCTTAUCAACACGAGGAAGT |
| R492 | 996 | CTGTCAGTTCAUCATCTTCCAUAAAAGC |
| R493 | 997 | TATACCAUACCTAUAGAGGGAGAACAGATAT |
| R494 | 998 | GCTTGAAGATTTUTCCAAAGTCAGAUGT |
| R495 | 999 | GTTTTGCTTTUGTCTGTTTTCCUCCAA |
| R496 | 1000 | AGGCAAAAATTCAUCACACAAATTGUCA |
| R497 | 1001 | TCATTGGAGGGUATGAGCCAUCC |

TABLE D

| Primer | | | Primer | | |
|---|---|---|---|---|---|
| Name | SEQ ID | Primer Sequence | Name | SEQ ID | Primer Sequence (target of PrimerC) |
| F498 | 1746 | GAGUGUGCGUGGCUCUCA | R498 | 1275 | UGCCAUCAUUCUUGAGGAGGAAG |
| F499 | 1002 | ACAACUGCAGCAAAGACUGGT | R499 | 1276 | UGCAAUCCCUGCCCCGGUT |
| F500 | 1003 | AGUUAAUUUUGGUUACAUCCCUCUCUGC | R500 | 1277 | GGAUUGCAGGCUCACCCCAAT |
| F501 | 1004 | AUCGAUCUGUUAGAAACCUCUCCAG | R501 | 1278 | CUGGAUUUCCUCAUGGAAGCC |
| F502 | 1005 | GGACUCUGUAGGCUGCAGT | R502 | 1279 | AAAUCCAGUUCGUCCUGUUCA |
| F503 | 1006 | UGAGGCAGUCUUUACUCACCUG | R503 | 1280 | GAAACUGCCUCUUGACCUGUCC |
| F504 | 1007 | ACAAGCAAAGUCUCUAUGGUGAUUAUGT | R504 | 1281 | AGGACAGUCAUGUUGCCAGUAUUAAAAT |
| F505 | 1008 | CAACUACCAUCCAGCAACAGAAAAT | R505 | 1282 | CUUCCAUGACUUUGGCAAUCUGG |
| F506 | 1009 | GACAGAUGAGAGAAAUGCACUUAGAAGA | R506 | 1283 | GAACAUGUCCUAUUUGAAUUUUCCGACUT |
| F507 | 1010 | AGGAAUGUGUUUCUCCAUACAGGUC | R507 | 1284 | GACACAAAGACUGGCUUACAUUUUGAT |
| F508 | 1011 | CUUCAAGCAGUGAGAAUACGUCCA | R508 | 1285 | AGGCUGACCACUUCUACUCUGT |
| F509 | 1012 | AGGGUCCAGGUUCUUCCAGA | R509 | 1286 | GCACUCAGGCUGGAUGAACAA |
| F510 | 1013 | GAUAGUUUUGAGAGUCGUUCGAUUGC | R510 | 1287 | UGUCCAGGGCUAUCUGGAAGAUC |
| F511 | 1014 | CUCCACCACCUCCUCAAACAG | R511 | 1288 | GCAGCAUUUACUGCAGCUUG |
| F512 | 1015 | AUCAGCCAGGCACAAAGC | R512 | 1289 | UGACAGAAGUACAUCUGCUAAACAUGA |
| F513 | 1016 | CAUCUUUGUCAUCAGCUGAAGAUGAAAT | R513 | 1290 | CUCACAGGAUCUUCAGCUGACC |
| F514 | 1017 | GCCUAAAGAAUCAAAUGAAAACCAAGAGA | R514 | 1291 | ACUUUGUUGGCAUGGCAGAAAT |
| F515 | 1018 | GUGACCCGGAGCACUUCC | R515 | 1292 | GCCGUGGUGCUGACCAT |
| F516 | 1019 | CCACAUUACAUACUUACCAUGCCACT | R516 | 1293 | GUGAUGAUUGGGAGAUUCCUGAUG |
| F517 | 1020 | AUGGGACCCACUCCAUCG | R517 | 1294 | GCUCUGAUAGGAAAAUGAGAUCUACUGUT |
| F518 | 1021 | CCCUUCUAAGGACCCCCUCUUC | R518 | 1295 | CUCCAGCAGGGCUUCGAT |
| F519 | 1022 | CUCUGCCGGGCUUUGAUCUT | R519 | 1296 | GGACUUUGCAACUUCAACAAAACUC |
| F520 | 1023 | UACUACCGCCUCACACGCT | R520 | 1297 | CUAGGUGUCUCCCCCUGUAAG |
| F521 | 1024 | UUCCCUCUCUCCUUCUGCCUC | R521 | 1298 | AGGUUCAGGCCUUGCACT |
| F522 | 1025 | CCAGCAGAAGACAAAAAGACAAACA | R522 | 1299 | CCAGCCCAGGAAGCAAAGAG |
| F523 | 1026 | GGAGAGGGAGGAGAGCUAACT | R523 | 1300 | UUAAAACUGGUCUCGCUCUCCC |
| F524 | 1027 | AGAAGCUGUGCAUUUACACCGA | R524 | 1301 | GAAAGCGGGAAUCGCAGAAA |
| F525 | 1028 | UUUUGCUGAUGCUAUGCUCUCCAC | R525 | 1302 | GGAAGACCUCUUCUUCGCACUT |
| F526 | 1029 | CUGAUCCGCAAGCAUGCUC | R526 | 1303 | CAAAAGAGCUCCCCCAUCUCC |
| F527 | 1030 | UGAGCUCGCUCACUUGUGAUG | R527 | 1304 | AGAAGAGACAUCUGGACUUAGCCAA |
| F528 | 1031 | CAGGAUCCAAAUUCGUUCUGUGC | R528 | 1305 | AUCAUCGACGGUGGGUACAUG |
| F529 | 1032 | UACUAACAACUCUGGUCUGGACCAT | R529 | 1306 | CGUUGGUCCUGACGGUACUG |
| F530 | 1033 | AUGCUAUUUGGACAAUAAACUCACCUUG | R530 | 1307 | CCAUUCUGAGGACUGCUGGUUUAUA |
| F531 | 1034 | CUCCUUACCUCAUACAGUGCAGAAA | R531 | 1308 | CCAGGACCAUCAUCCUACUGUAA |
| F532 | 1035 | CCCUGAGUGCAGCUUCGAUC | R532 | 1309 | GAGUGUUUGCUCCUCACUCUUC |
| F533 | 1036 | CGAUCAUGGAUGGCGGGUAC | R533 | 1310 | CUUCAGGUUUCCUUCUCUCAUGGUT |
| F534 | 1037 | UUUAUGAAUGGAGAGGCUGCUG | R534 | 1311 | GGAUGAGCUCACAGAGCUGC |
| F535 | 1038 | ACCUCUCACCCUUAUAAGUCUUCUGA | R535 | 1312 | UCAAAAAGCAUGCCCAGACCUUT |
| F536 | 1039 | ACUUGAGCUUCCCUAGGACCA | R536 | 1313 | ACUUUGAGACUUCUGCUUUGCUC |
| F537 | 1040 | GGGAGACAAUACGUGUCGGG | R537 | 1314 | AUCGAAAAACUGUGCAUCUACACC |
| F538 | 1041 | AAGACAGGUAGCGAUCCAGGUAG | R538 | 1315 | AGACCCAGCAGUGACUGT |
| F539 | 1042 | CUAGGUGCCCAUGUCCAUCUG | R539 | 1316 | ACAAGUAUAAUGAGCACCCCUUCT |
| F540 | 1043 | GAUGUCCAAUGUACCUGAGGCAA | R540 | 1317 | GUGGACACACCUGUAUUCCUGAG |
| F541 | 1044 | CAGCAGAAAGAGGACUCAGAAUAGAAAAUC | R541 | 1318 | CCGACCAGUUGGGCAAAAUC |
| F542 | 1045 | AGAGAUUCGCUUGUGUGGGUUAAA | R542 | 1319 | GCAGAAGUCUGUUUUCUUCAUGGUT |
| F543 | 1046 | ACCAGGGUUACCUUGAUCUCC | R543 | 1320 | AGGCCAUGUUGGGUUAAAGG |
| F544 | 1047 | ACUUCUCAAUUGCUACGGGCAAUC | R544 | 1321 | AGAAUCUACAGCUACCAGAUGGCA |
| F545 | 1048 | AGAUCUCGGUGAACGAUGCAAT | R545 | 1322 | CCUAGUUUCCAGUGCAUCUGUACC |
| F546 | 1049 | UAUGUGGACUGCAGAAGAACUUCG | R546 | 1323 | GGUCCCCAUCCAUUCUUCCUAUUC |
| F547 | 1050 | UGUGGUUUAUGAACAAGCGAUUUGG | R547 | 1324 | UGUGGAGUGUUGGCUGUAUCUUUG |
| F548 | 1051 | GCUCAUAUCGAGAGGUAGCCAUUC | R548 | 1325 | CUCUGUAAGCGACUUUUGGUGAUAG |
| F549 | 1052 | GCAGACGAGCUUGACAUCAGAAA | R549 | 1326 | GCCCAACCAAUUGAGAAGUUUGUAA |
| F550 | 1053 | AAGACUUCGGGUGCUCUGUAC | R550 | 1327 | UUAGUCAGGAGUCUAAGCCAACAG |
| F551 | 1054 | GGGACAGACUGUCAUUCAAAAUAGGA | R551 | 1328 | CUUGCCCGCAUCUAUAGUUUCCA |
| F552 | 1055 | UGAAGAAAGUCCAGACCUCGGA | R552 | 1329 | AACUUCCGUUUUGAGUGUUUACUGAUUT |
| F553 | 1056 | GUCGACUGCCUGAUAAGACAUGA | R553 | 1330 | UUACUUGGAUAAAGUUCCAGAGCCT |
| F554 | 1057 | UAGUUUGGUUUCUCUGUCUGUUCGUG | R554 | 1331 | GCUUAUUGCCACCUACUUAACCUCT |
| F555 | 1058 | AAGCCUCCAUCGCUACCCT | R555 | 1332 | CUUCAGCCCUGCAGGGAAA |
| F556 | 1059 | UCAGGCGCCAAGUAGGT | R556 | 1333 | GGCAAGUUCAACAUUAUUCCCUUUUGUA |
| F557 | 1060 | AAAGCGGCUGUUAGUCACUGG | R557 | 1334 | UCUUCCUCAGGAUUGCCUUUACC |
| F558 | 1061 | UAAAGAUCAUGUCUCGGCUCAAGGA | R558 | 1335 | CAUACAGAGAGGGUCAUCAGUGAUAC |
| F559 | 1062 | GUGCACAGGUUAUUCUGAUUUCCC | R559 | 1336 | GAAAGUCUCCCACAAAGUAACCC |
| F560 | 1063 | AGAAGGGCUAGGCCAAUUGAC | R560 | 1337 | AUAGUCAUAGCCGGGCCACA |
| F561 | 1064 | GUCAGCCUGAACAUAACAUCCUUG | R561 | 1338 | CCAGUUUAUUGUAUUUGCAUAGCACA |
| F562 | 1065 | GGGACCUCCGGUCAGAAAAC | R562 | 1339 | GGACCCAUUAGAACCAACUCCAUAAA |
| F563 | 1066 | CUCCCAACCAAGCUCUCUUGA | R563 | 1340 | UACCUUAUACACCGUGCCGAA |
| F564 | 1067 | CCCAGAAGGUGAGAAAGUUAAAAUUCC | R564 | 1341 | CCACACAGCAAAGCAGAAACUC |
| F565 | 1068 | AGGGCAUGAACUACUUGGAGG | R565 | 1342 | UUCUUUCUCUUCCGCACCCA |
| F566 | 1069 | GCCUCUCCCUCCCUCCAGGAA | R566 | 1343 | GUGAGGCAGAUGCCCAGCA |
| F567 | 1070 | UGCCUCACCUCCACCGT | R567 | 1344 | CCAAUAUUGUCUUUGUGUUCCCGGACA |
| F568 | 1071 | AAGUGUAAGAAGUGCGAAGGG | R568 | 1345 | UGUGUUCCUUUGGAGGUGGC |
| F569 | 1072 | GCCUUUUUAACUGGUAGAGAUUGGUG | R569 | 1346 | GAUCCAGAGGAGGAGUAUGUGUGA |
| F570 | 1073 | UCAUCACCUUCCUUUCAUGCUCUC | R570 | 1347 | UCUUCCUCCAUCUCAUAGCUGUCG |
| F571 | 1074 | UCCUACGUGGUGUGUGUCUGAA | R571 | 1348 | CGUCCUGUUUUCAGGCCAAG |
| F572 | 1075 | UGAUCAUCGAAUUCUCCAAAAUGGC | R572 | 1349 | AUUAGAGGGACUCUUCCCAAUGGA |
| F573 | 1076 | GAUGAGAUGUGGUACAAGCAUUCCA | R573 | 1350 | CCACGGUGGAAUUGUUGCUG |
| F574 | 1077 | CCCCUACAGCAUUGUUAAGAAAGUAUUT | R574 | 1351 | AUACCAGGCUAGUAUAGAUGCUUAGGG |
| F575 | 1078 | CUGGGACUAGCAUGCUGACC | R575 | 1352 | CAGACACCAACUCCCGGAAUC |
| F576 | 1079 | CUGCCUGUCUCUGGUUCUGT | R576 | 1353 | CAGAACUCUCUCCCCAGCAG |
| F577 | 1080 | ACUUGGAGUGAGUUUGGAUGGG | R577 | 1354 | CAGCUUCAUGUCUGUGCCG |
| F578 | 1081 | UCCUGAUCUCCUUAGACAACUACCUT | R578 | 1355 | UCACACCGCUGUGUUCCAUC |
| F579 | 1082 | UGUUCCUAUUUCAGCCCCACUC | R579 | 1356 | GUUGUGAGCGAUGAGCACGUA |
| F580 | 1083 | GGAAAGGGUCCUCUGAUCAUUGC | R580 | 1357 | AAAAUCGUGUCCUGGUAGCAGAG |
| F581 | 1084 | CGAGGGCCGGUAUACAUUCG | R581 | 1358 | CCCACCAAAAUGAGAAAACUGUGUT |
| F582 | 1085 | GAAUGUGAAAAUUCCAGUGGCCAT | R582 | 1359 | UGUCCUCCUAGCAGGAGAGG |
| F583 | 1086 | AUACCCUCUCAGCGUACCCUT | R583 | 1360 | CCGUGGAUGUCAGGCAGAUG |
| F584 | 1087 | AGCGCUUUGUGGUCAUCCA | R584 | 1361 | AUACUGGACUCAUCUCUCCUUCCC |
| F585 | 1088 | AAACUAGCCCUCAAUCCCUGAC | R585 | 1362 | AAAGACCACCCCCAAGACC |
| F586 | 1089 | CACAGUUGGAGGACUUCCUCUUC | R586 | 1363 | AUAACUCCACACAUCACUCUGGT |
| F587 | 1090 | CUACAUGGGUGCUUCCCAUUCC | R587 | 1364 | UUGACAUGGUUGGGACUCUUGAC |
| F588 | 1091 | GUCCUCGUGGCCAUGAAUGAA | R588 | 1365 | UGGCAAACUUCCCAUCGUAGAC |
| F589 | 1092 | CCCAAUCCCCACACCAAGUAUC | R589 | 1366 | GUUGAUCAUUGUUCCUUCCCCUCA |
| F590 | 1093 | AUGUUCCUCCCUCAUCUCUAAUGGT | R590 | 1367 | CCAUCUUGUCAGGAGGACAGG |
| F591 | 1094 | UGGACUCGAGCAACAUUGAUGG | R591 | 1368 | GGCAGGAUCUCUAACCCAUUGAG |
| F592 | 1095 | GCUGAAGUACCAGACCUGCUA | R592 | 1369 | CUCAGCAGGUAACUCACACUUG |
| F593 | 1096 | GGAUUUGACCCUCCAUGAUCAGG | R593 | 1370 | CUUCCCUGGGUGCUCCAT |
| F594 | 1097 | UCACUCUCUCUCUGCGCAUUC | R594 | 1371 | GUGGAUAUGGUCCUUCUCUUCC |
| F595 | 1098 | CAUGAAGUGCAAGAACGUGGT | R595 | 1372 | GGCUAGUGGGCGCAUGUAG |
| F596 | 1099 | GCGGAUCAGAGCCUCAAAC | R596 | 1373 | AUCAAAGUCCAGCACCAGCA |
| F597 | 1100 | ACUGUCCUGUUUUGAUAUCCCAGAUUUT | R597 | 1374 | GGGAAUUGCAUUCACACGUUAACA |
| F598 | 1101 | CUGUCUCAAUAUCCCAAACCCUAAG | R598 | 1375 | UUUGUUUUGUUUUUCUGUUUCUCCCUCUG |
| F599 | 1102 | UAUUAGUAUGCCCCUGCAACGUG | R599 | 1376 | GAGGGUUGUUAGUGGAGCAUAUGA |
| F600 | 1103 | CAACCCUCCUGCCAUCAUAUUGA | R600 | 1377 | UGAGACAGGCCAGUGUUUACAUG |
| F601 | 1104 | CAACCAUGACAAGAUUUUCCCUUACC | R601 | 1378 | GAGACUGGAGAAUGUAUACACACCUT |
| F602 | 1105 | UGCCUGUGGAGGAACUUUUCA | R602 | 1379 | CGACAUCUCCUCGGGCUT |
| F603 | 1106 | CUUCCUCUCGCCCAUCACA | R603 | 1380 | CGUAGAGCUCCGGGUGUC |
| F604 | 1107 | AGUGCCUCCUCUCCCAUCUT | R604 | 1381 | CUACCCAGGGCCACUGUUUT |
| F605 | 1108 | CACUCCUUGCUUCUCAGAUGAAACC | R605 | 1382 | GGGACAUUCACCACAUCGACUA |
| F606 | 1109 | CAGGUACUCCCGCAGGUUG | R606 | 1383 | UGGCCUCUUCUCCUGUGC |
| F607 | 1110 | CACGCAUACGGUUUGGUUUGG | R607 | 1384 | CUUCUUCUUCCCAUAGAUGCUCUCC |
| F608 | 1111 | CUAGAAGCUCUCUAUCCCACACCT | R608 | 1385 | GAGGCAUUAUUUGACCGGAUCUAC |
| F609 | 1112 | CAAGGAAUGCCUUCAAAAAGUUGGG | R609 | 1386 | CUGAGUAUGAGCUUCCCGAAGAC |
| F610 | 1113 | AGAUGAUGAUCUCCAGGUACAGG | R610 | 1387 | CCUGCUAACACCCUGUUCG |
| F611 | 1114 | CGGCACUGCAUGCAAUUUCUT | R611 | 1388 | CUGCCUGUCUCUCUUGGCUUT |
| F612 | 1115 | CCAUUUAUAGCUGAGUCUCCAUCCUG | R612 | 1389 | UAUGAACUUCCAGAGGACCCAAAAUG |
| F613 | 1116 | CCCAGUUGUGGGUACCUUUAGAT | R613 | 1390 | GGAAAAGAACGGCAGUAAAUACGG |
| F614 | 1117 | CUUUCAAACGAGUCAAGCAAGAAUGG | R614 | 1391 | AAUACGGGUCCAUCAAUCACACG |
| F615 | 1118 | ACCACACUUUCCAUAAUGAGGCT | R615 | 1392 | CAGUACUUGGUAUUCUGUGCUAGGA |
| F616 | 1119 | CUUUUCCAUCUUUUCUGUGUUGGUC | R616 | 1393 | GGAAGCUGUCCAUCAGUAUACAUUC |
| F617 | 1120 | CAGACAAAUCCCAAAACAAACCUGA | R617 | 1394 | GGCCCUCCUUCAGUUUAGUUGAG |
| F618 | 1121 | GUAGCUACAGGACUCAGAUACGUG | R618 | 1395 | GGUGGAGGCGAUAGUGGAUAG |
| F619 | 1122 | GUAUUUGGGCGAAUGCAGUUUUUC | R619 | 1396 | AGAUGGAGAUGAUGAAGAUGAUUGGG |
| F620 | 1123 | CCAGAGAAAAGAGAGUUACUCACACA | R620 | 1397 | GUCAAGUGGAUGGCUCCAGAAG |
| F621 | 1124 | ACUGUGUUACUGCCAUCGACUUAC | R621 | 1398 | CCAGAAAUGUUUUGGUAACAGAAAACAA |
| F622 | 1125 | GGUAUUCUCGGAGGUUGCCUUT | R622 | 1399 | AUUCUCUCUUUAGGGAGCUUCUCUUC |
| F623 | 1126 | CUUGGUCGUGUUCUUCAUUCGG | R623 | 1400 | UGGAAGAGAAAAGGAGAUUACAGCUUC |
| F624 | 1127 | ACCACUGUGGAGGCAUUUG | R624 | 1401 | AUUGGUCUCUCAUUCUCCCAUCC |
| F625 | 1128 | AGUGAAGAUCUCCCACAUUAACACC | R625 | 1402 | GUUUAGGUUUUGGCAACGUGGAT |
| F626 | 1129 | CUUGCCCAAAGCAACCUUCUC | R626 | 1403 | UCACCAGAUGCUAUGUGCUAAUCC |
| F627 | 1130 | AUUGGUUGCGGCCAUCUCT | R627 | 1404 | UCCUACCUGUGUCCACACC |
| F628 | 1131 | ACCAAUUUCAUAGGCGUGGC | R628 | 1405 | GGCAUGGGACAGAGUCGUT |
| F629 | 1132 | GCCUAUCGCUCUGCUCUCUC | R629 | 1406 | UUGUGCAAGGAGAGAACCUCUA |
| F630 | 1133 | UAACCCAGCGACGAACUUUCC | R630 | 1407 | CCUAUCCCAGAACUGGAGACAGAAA |
| F631 | 1134 | GCCCCUGAGCGUCAUCUG | R631 | 1408 | UGUACACCUUGCAGUGGAACT |
| F632 | 1135 | CUGGUGGAGGCUGACGA | R632 | 1409 | AGCCCAGGCCUUUCUUGG |
| F633 | 1136 | ACAACGUGAUGAAGAUCGCAGA | R633 | 1410 | ACUGGCAUGACCCCCAC |
| F634 | 1137 | GGGAGAUCUUCACGCUGGG | R634 | 1411 | UGCCACUCACAGGUCGT |
| F635 | 1138 | GUCUGAGGAGCCCGUGT | R635 | 1412 | GCAGAAACUCCCGCAGGT |
| F636 | 1139 | UCCUCGGAGCAGUGAGGG | R636 | 1413 | ACUCCAGAUACUGCAUGCCT |
| F637 | 1140 | AGCCUCUCCACGCUCCCUC | R637 | 1414 | ACUCCCGCAGGUUUCCC |
| F638 | 1141 | CUCACAUUGCCCCUGACAACAUA | R638 | 1415 | ACGGGAAAGUGGUGAAGAUAUGUG |
| F639 | 1142 | GUGUCCUUUCAGGAUGGUGGAUG | R639 | 1416 | AGAAACAUGAUGGAUGUCACGUUCUC |
| F640 | 1143 | GGUGACAUUUUCAAAGCAGUGUAUCC | R640 | 1417 | UGUUAACCUUGCAGAAUGGUCGAT |
| F641 | 1144 | GGGUAUUCGAUGAUCCCUGUGG | R641 | 1418 | AUGACUUGGACCGCGUAGC |
| F642 | 1145 | CCUCCCCACCAGCAUGUUT | R642 | 1419 | GCAUCCUACCGUUGAAGCACT |
| F643 | 1146 | GGCUUUGGUGAGAUCCAUUGAC | R643 | 1420 | CACCUGGAACUUGGUCUCAAAGAUT |
| F644 | 1147 | GCAUGUACUGGUCCCGCAT | R644 | 1421 | AUUCCUACCGGAAGCAGGT |
| F645 | 1148 | UGGUUCUGGAUCAGCUGGAUG | R645 | 1422 | AUGACGGAAUAUAAGCUGGUGGT |
| R646 | 1149 | UGCCAACAUGACUUACUUGAUCC | R646 | 1423 | AAAAUAUCCCCCGGCUUGUGAG |
| F647 | 1150 | GGACUAGGCGUGGGAUGUUUUT | R647 | 1424 | GAAGAAGAUGUGGAAAAGUCCCAAUG |
| F648 | 1151 | AGUGGAUCCCCUCUCCACC | R648 | 1425 | GUCCCUGGCUGGACCAA |
| F649 | 1152 | GAGGUUUUCCAGCACUCUGACAUAT | R649 | 1426 | CACACAUUGGAGCAUGCCAUUC |
| F650 | 1153 | CGGUUGAAUGUAAGGCUUACAACG | R650 | 1427 | AGCCUAAACAUCCCCUUAAAUUGGAUT |
| F651 | 1154 | GAACGGGAAGCCCUCAUGUC | R651 | 1428 | CGGCUUUACCUCCAAUGGUG |
| F652 | 1155 | CCUUACUCAUGGUCGGAUCACAAAG | R652 | 1429 | GCAGAGAAUGGGUACUCACGUUUC |
| F653 | 1156 | CCCUUUCUCCCCACAGAAAC | R653 | 1430 | UCAGCCUGUUUCUGGGAAACT |
| F654 | 1157 | GUAGAGCAAAUCCAUCCCCACA | R654 | 1431 | UGGAGAGAGAACAAAUAAAUGGUUACCUG |
| F655 | 1158 | UGUGCUUUUAGGGCCCACC | R655 | 1432 | GAUUCUUAUAAAGUGCAGCUUCUGCAT |
| F656 | 1159 | UCUGUUCAAUUUUGUUGAGCUUCUGAAUT | R656 | 1433 | CAGACGUCACUUUCAAACGUGUAT |
| F657 | 1160 | UCAGUGUUACUUACCUGUCUUGUCUUT | R657 | 1434 | CAGGCUCAGGACUUAGCAAGAA |
| F658 | 1161 | UGAAUUAGCUGUAUCGUCAAGGCA | R658 | 1435 | UAAGGCCUGCUGAAAAUGACUGAA |
| F659 | 1162 | UGUUUCUCCCUUCUCAGGAUUCCUA | R659 | 1436 | AGUCCUCAUGUACUGGUCCCT |
| F660 | 1163 | AAACCCGCAAUCCGGAAC | R660 | 1437 | CUGAUCUCGCCAUCGCUGUA |
| F661 | 1164 | CCCUCCAACAUCCUAGUCAACUC | R661 | 1438 | GUUCAUACCGACAUGUAGGACCUT |
| F662 | 1165 | GCUAGAGCUUGAUGAGCAGCAG | R662 | 1439 | UCAAAGUCGUCAUCCUUCAGUUC |
| F663 | 1166 | CCAUGGAGUCGAUGAGCUGG | R663 | 1440 | CCUCCAGAUGUGAAGCCCT |
| F664 | 1167 | GCCCAGCUCUGAGAUCCUUUC | R664 | 1441 | GCUGGAGGAGCUGGAACUT |
| F665 | 1168 | CAUUUCUGACAACUGAACUGCUCUC | R665 | 1442 | UAAACAGGAGCACGAGGAUGC |
| F666 | 1169 | UUACCAGCUUGUUCAUGUCUGGAUUC | R666 | 1443 | UAUUCAUCACGGCGCGCUT |
| F667 | 1170 | ACUGAGCUUGUUGGAAUAAGGAUGUT | R667 | 1444 | GAGUCCAGGAGAAAAUUCACAUGAGG |
| F668 | 1171 | UUGUAAGUGCCCGAAGUGUAAG | R668 | 1445 | ACAACCCACUGAGGUAUAUGUAUAGGUAUT |
| F669 | 1172 | UACGCAGUGCUAACCAAGUUCUUUC | R669 | 1446 | AGCACAGUGAAUUUUCUUGCCAUC |
| F670 | 1173 | CAGUCAAGGUUGCUGAUUUUGGUC | R670 | 1447 | GGUGGUAAACUUUUGAGUUUGCAGA |
| F671 | 1174 | UAUGGAUGUUGCCAAGCUGUAUUCUG | R671 | 1448 | GGGAAGGAGUGGUACAACAGAT |
| F672 | 1175 | GGUGGUCCUACCAUACAUGAAACAT | R672 | 1449 | ACAGCUAGUUUGCCAGUUAGUAAGC |
| F673 | 1176 | GCAAGCAAAAAGUUUGUCCACAGAG | R673 | 1450 | CACUUAAUUUGGAUUGUGGCACAGA |
| F674 | 1177 | ACAUCUCUCACCUCAUCUGUCCT | R674 | 1451 | CUCUUGUCAUCAGCUCCCAGA |
| F675 | 1178 | UCCCUGUAGUCCCGGAUGAG | R675 | 1452 | GCGCCAGCAUCCAGAGAUAC |
| F676 | 1179 | AAUUGUUGCCAUUUCAGGGUUUCUG | R676 | 1453 | GAGCGUGUGAUGCAGCUCUT |
| F677 | 1180 | CUCACCUAUCUCCCAGGCCUAAAAUA | R677 | 1454 | GUUUGACCGAAGAACCAAUUAUACCC |
| F678 | 1181 | ACAAACGAGAUGCCUCUUCCAG | R678 | 1455 | GAUGCUUCUCUCCUUCUUCUCUUGG |
| F679 | 1182 | GGCUGUCGUGGUAGACUUAGA | R679 | 1456 | UUCCCCAACCCACAUUUCCUUUAUAG |
| F680 | 1183 | CUGAGUGUAUCCUGGAGGUUGUUG | R680 | 1457 | CCAAAACCCUCCUGAUGUACACG |
| F681 | 1184 | GCUUGGUUCUGAUGUUUGUAGUGUAG | R681 | 1458 | GUCACAGCUCCAGUGUCUGUC |
| F682 | 1185 | UCCUUGUUGGUGUCCAUUUUCUUGT | R682 | 1459 | GAGAUCCAGGCUACCUGGUAUGAG |
| F683 | 1186 | ACAUGCCAUCAUUCUAGGAAGCUC | R683 | 1460 | AAGGACGACCCAGAGCUGAT |
| F684 | 1187 | CAGGACCCGCUUCUCUGAAAG | R684 | 1461 | AAAUUAAAAGGCAAGUGGACUUCGG |
| F685 | 1188 | AAGACCCCUUUAACUCAAGACUGC | R685 | 1462 | CUGUUGGUGAAGCUAACGUUGAG |
| F686 | 1189 | UGCUCCAUGAGGAGACACC | R686 | 1463 | AAAAUGGGAAAGGUAUCCAGCC |
| F687 | 1190 | AAUGUAACCUUGCUAAAGGAGUGAUUUCT | R687 | 1464 | CCACAGAAACAACAUCGAUUUCUUCC |
| F688 | 1191 | AACUGGCAAAUAUAUCAUUGAGCCAAAUC | R688 | 1465 | ACAGGGAUGGUGGUGGUT |
| F689 | 1192 | GGUGUGAAAUGACUGAGUACAAACUG | R689 | 1466 | UUCUGGAUUAGCUGGAUUGUCAGUG |
| F690 | 1193 | AUGGUGAAACCUGUUUGUUGGACAT | R690 | 1467 | GGCAAAUACACAGAGGAAGCCUT |
| F691 | 1194 | CCUGCUCAUGGUCUUUGAGUAUAUG | R691 | 1468 | AUGUCUAUAGGGAAGGGAAGACG |
| F692 | 1195 | GCCACACGCAACUGUCUAG | R692 | 1469 | GUCGGUGCUGUAGAUAUCCCT |
| F693 | 1196 | GACAAUCCUUGCUUACCUGAGGAAC | R693 | 1470 | ACAUUGUCAAGUUCUAUGGAGUGUGC |
| F694 | 1197 | GCUCGGGAUCCAUAUGUGGUAAT | R694 | 1471 | CUGGCUGAAGGUGGGUUUGAUT |
| F695 | 1198 | GGCCCUAUACUUAGGCCCUUUT | R695 | 1472 | AAGUCACACGGCCCUCC |
| F696 | 1199 | AACUCACGGUGGCUGCT | R696 | 1473 | UUGUUCUCAUUGGCUUCAAAGAUCUUUA |
| F697 | 1200 | UGUCCUGGUCAUUUAUAGAAACCGA | R697 | 1474 | UCUCUUGGAAACUCCCAUCUUGAG |
| F698 | 1201 | UCUCAUGUCUGAACUGAAGAUAAUGACT | R698 | 1475 | UGAGCCCACCUGACUUGG |
| F699 | 1202 | UUGGUAGCUCAGCUGGACUGAUAT | R699 | 1476 | ACAUGAGAGCUUGUUUUUCACUGG |
| F700 | 1203 | AUGAAGCAGGCUGAUACUACACAG | R700 | 1477 | AGAGUGAUCUCUGGAUGUCGGAAUA |
| F701 | 1204 | UUGUGAAGAUCUGUGACUUUGGC | R701 | 1478 | ACCAGUGAGGGAAGUGAGGAC |
| F702 | 1205 | CCUUUGGGUUAUAAAUAGUGCACUCAGA | R702 | 1479 | UAAGCAUCAGCAUUUGACUUUACCUUAT |
| F703 | 1206 | GGGAAGAAAAGUGUUUUGAAAUGUGUT | R703 | 1480 | CAAACAAGUUUAUAUUUCCCCAUGCCA |
| F704 | 1207 | UGGCUUUGAAUCUUUGGCCAGUA | R704 | 1481 | GAUUUGAUCCAGUAACACCAAUAGGGUT |
| F705 | 1208 | GUCGAGGCAAUGGAAAAGCUC | R705 | 1482 | AAACACAAACUAGAGUCACACACCUT |
| F706 | 1209 | AGAACAGCUCAAAGCAAUUUCUACA | R706 | 1483 | AGCACUUACCUGUGACUCCAUAG |
| F707 | 1210 | AGCAAGAGGCUUUGGAGUAUUUCAUG | R707 | 1484 | UUGUGUGGAAGAUCCAAUCCAUUUUUG |
| F708 | 1211 | UGUUCAUGCUGUGUAUGUAAUAGAAUGUT | R708 | 1485 | AACCAUAUCAAAUUCACACACUGGC |
| F709 | 1212 | CUGGAAUGCCAGAACUACAAUCUUUUGA | R709 | 1486 | CUCUUGCUCAGUUUUAUCUAAGGCUAG |
| F710 | 1213 | CUCAAGAAGCAGAAAGGGAAGAAUUUUT | R710 | 1487 | CAUACCAAUUUCUCGAUUGAGGAUCUUUUC |
| F711 | 1214 | UGACAGCCAUCAUCAAAGAGAUCG | R711 | 1488 | CCGCAGAAAUGGAUACAGGUC |
| F712 | 1215 | GGGAUUUCCUGCAGAAAGACUUGA | R712 | 1489 | AGAAAAUCAAAGCAUUCUUACCUUACUACA |
| F713 | 1216 | AAGGCACAAGAGGCCCUAG | R713 | 1490 | UCCAGGAAGAGGAAAGGAAAAACAT |
| F714 | 1217 | ACCAAUGGCUAAGUGAAGAUGACAAT | R714 | 1491 | AUUUGCCCCGAUGUAAUAAAUAUGCAC |
| F715 | 1218 | AGGUUAUCUUUUUACCACAGUUGCAC | R715 | 1492 | GUCAAGAUCUUCACAAAAGGGUUUGA |
| F716 | 1219 | UUUUCUGUCCACCAGGGAGUAACUA | R716 | 1493 | GCCACUGGUCUAUAAUCCAGAUGA |
| F717 | 1220 | GACAAGUUCAUGUACUUUGAGUUCCC | R717 | 1494 | GCAUCUUGUUCUGUUUGUGGAAGAA |
| F718 | 1221 | AGCAAAUAAAGACAAAGCCAACCG | R718 | 1495 | UCAACAACCCCCACAAAAUGUUT |
| F719 | 1222 | AGUUUAAGAUGAGUCAUAUUUGUGGGUUUT | R719 | 1496 | UGGAUUUGACGGCUCCUCUAC |
| F720 | 1223 | CUGACCAUGUGGACAUUAGGUGUG | R720 | 1497 | UUAACACCUCCAGUCCCUCAUCUG |
| F721 | 1224 | CCUUCCCUCGGGAAAAACUGAC | R721 | 1498 | UAAGAUGUCCACUGCUGUUCCUUCAUA |
| F722 | 1225 | GUUUGGUUUUGUAGGUCUUGUGGAUG | R722 | 1499 | CUUCAGCCAAGGCAGCAAUG |
| F723 | 1226 | GAGGUGGCCUGAUCUUCACAA | R723 | 1500 | GAUAUGGAUUCACACAGACACUAUCACA |
| F724 | 1227 | CGCUUAUGCAUACUCAGGAUGAGUT | R724 | 1501 | CAAGGUGUUUCUUUGAUGCUCUGT |
| F725 | 1228 | UAAGGUUCCUUCAAGCUGCCCUA | R725 | 1502 | CCUGUGGACAUUGGAGAGUUGAC |
| F726 | 1229 | CAUGGGAGGAUGUUCUUUCCCAUUT | R726 | 1503 | GAACCUUAAAUGUCUCUCCUACCUGA |
| F727 | 1230 | UUUUCUUCCUAAGGUUGCACAUAGG | R727 | 1504 | AAGGCACCUGACCCAAACA |
| F728 | 1231 | AUUUUUGGCUUCCUGGCCUUT | R728 | 1505 | GCACAUAGUCCCGGAAGCUG |
| F729 | 1232 | GGAAAGCCUCACCUGUCUACG | R729 | 1506 | UUCUUGAUCUCACAGUCAGGGAUG |
| F730 | 1233 | UCAAGAAUCGCCCGAGCC | R730 | 1507 | AUGAGCAGCGUGGCCUT |
| F731 | 1234 | UUGGUUCGGACAGACAACCC | R731 | 1508 | UAGCUGUGCAUGUCCUGGUG |
| F732 | 1235 | CUCUGCACAGCUCCAAUGAGAC | R732 | 1509 | UAGGUGAGGACCACAAACCAAAC |
| F733 | 1236 | GCUACAAGAACUACCGAUACCGT | R733 | 1510 | UGGUCUUCACUCACCUCGGAT |
| F734 | 1237 | CUCGGAGAGGAGCCAUACUG | R734 | 1511 | UUCCUCCAGAAGCUUGAACUCT |
| F735 | 1238 | UAUAAUGACAGUUAACCCUGCCAGGA | R735 | 1512 | CCCAAGCCUGGGACCUCUAUUAT |
| F736 | 1239 | AGGAAGAGCACAGUCACUUUGA | R736 | 1513 | CAUGCUGGACCUUCUGCAC |
| F737 | 1240 | CAGUGGAGCGAAUUCCUUUGGA | R737 | 1514 | AGACUGCUAAGGCAUAGGAAUUUUCG |
| F738 | 1241 | UUGGGUCGUUGGGCAUUCC | R738 | 1515 | UUUGACUCUGUCUCCUCUUGUCUUCT |
| F739 | 1242 | CAGUUCACAGUGCAGCGAAAA | R739 | 1516 | GAGAUGAAGCAAACAACAGUGGAG |
| F740 | 1243 | AAAUAUCUACACACAGGUCUACAAGGUC | R740 | 1517 | AUUUCAUGCAAACUAGAUAACUACCUGUAA |
| F741 | 1244 | CAUCCGGGCUUUACGCAAAUAA | R741 | 1518 | UGGAGUUUGUCUGCUGAAUGAACC |
| F742 | 1245 | GCCUCCUUCAGGAAUUCAAUCUUCT | R742 | 1519 | AGCUCACAGAAAUGUCUGCUAUACUG |
| F743 | 1246 | AUGAGUUCUGGGCACUGGG | R743 | 1520 | AUGAGGAGUGUGUACUCUUGCAUC |
| F744 | 1247 | GAUGCAAACUCUUGCACAAAUGCT | R744 | 1521 | GCCAAGAGUUACGGGAUUCCAT |
| F745 | 1248 | GAACCCCGAGGGCAAAUACAG | R745 | 1522 | AGGAUGCCUGACCAGUUAGAGG |
| F746 | 1249 | CAGUUCGUGGGCUUGUUUUGUAUC | R746 | 1523 | AAAAGACUCGGAUGAUGUACCUAUGG |
| F747 | 1250 | UUAAAGCUGGCUAUGGCACCUG | R747 | 1524 | CACUCACCCUGGAUGUCUUCG |
| F748 | 1251 | CAUCUCUCACCAUCCCAAGG | R748 | 1525 | CACCGUAGCUCCAGACAUCA |
| F749 | 1252 | AUACGCAGCCUGUACCCA | R749 | 1526 | AAGGAGAAGAGGACAGCGG |
| F750 | 1253 | CACCUCUCUCAAGAGUUUGGAUGG | R750 | 1527 | CCUGCACUUCUAGGCACUUACUAA |
| F751 | 1254 | AGAUUGCGAGAGAGCUGCAT | R751 | 1528 | GGCACUUGCACAGAGAUGAT |
| F752 | 1255 | CUGUGCUGCAUUUCAGAGAACG | R752 | 1529 | AUUUGAUGACAUGUGGGUGGUUG |
| F753 | 1256 | AAGACCCAAGCUGCCUGAC | R753 | 1530 | GGAGCCGUAUUUGGCGT |
| F754 | 1257 | GCUAUUUUUCCUCACAGCUCGUUC | R754 | 1531 | CCUCUUCACGUAGGAAUCCUCUUC |
| F755 | 1258 | CUCCUUCCUAGAGAGUUAGAGUAACUUC | R755 | 1532 | AUCACUUUGCGUGGUGUAGAUAUGAT |
| F756 | 1259 | GAGCCUGUUUUGUGUCUACUGUUCUA | R756 | 1533 | AGGACUCUGAAGAUGUACCUAUGGT |
| F757 | 1260 | CUCUUGCAGCAGCCAGACT | R757 | 1534 | ACAGUUUCCAUAGGUCUGAAAAUGUUT |
| F758 | 1261 | CCAUGGGACUGACUUUCUGC | R758 | 1535 | AGCCCAACCCUUGUCCUUAC |
| F759 | 1262 | GCUGAGGACCUGGUCCUCT | R759 | 1536 | GGGACAGCAUCAAAUCAUCCAUUG |
| F760 | 1263 | CUGCACCAGCAGCUCCUA | R760 | 1537 | CCAGACGGAAACCGUAGCUG |
| F761 | 1264 | CCCGGACGAUAUUGAACAAUGGT | R761 | 1538 | GGAGCAGCCUCUGGCAUT |
| F762 | 1265 | AGCCUCACCACGAGCUG | R762 | 1539 | GGCAAGGAAAGGUGAUAAAAGUGAAUCT |
| F763 | 1266 | CACCUUUCCUUGCCUCUUUCCUA | R763 | 1540 | ACUUGAUAAGAGGUCCCAAGACUUAGT |
| F764 | 1267 | CUCAAGGAUGCCCAGGCT | R764 | 1541 | CCUAUGGCUUUCCAACCUAGGA |
| F765 | 1268 | CCUCCCUGCUUCUGUCUCCUA | R765 | 1542 | CCCUUCUGUCUUGAACAUGAGUUUT |
| F766 | 1269 | CCAGUUGCAAACCAGACCUC | R766 | 1543 | UGUGGAGUAUUUGGAUGACAGAAACA |
| F767 | 1270 | ACUCCACACGCAAAUUUCCUUC | R767 | 1544 | AGGCCUCUGAUUCCUCACUGAT |
| F768 | 1271 | AGGGUGGCAAGUGGCUC | R768 | 1545 | CCUAGGUUGGCUCUGACUGT |
| F769 | 1272 | GAGGCUCCCCUUUCUUGC | R769 | 1546 | UGCCUCUUGCUUCUCUUUUCCT |
| F770 | 1273 | CUGUGACUGCUUGUAGAUGGC | R770 | 1547 | UUCCUACAGUACUCCCCUGC |
| F771 | 1274 | CUGUCGUCUCUCCAGCCC | R771 | 1548 | AGUCACAGCACAUGACGGA |
| F772 | 1549 | GGAGGAGGCGAUGGCUACUA | R772a | 1574 | CUGCAGUUAGAGGUUGGUGACA |
| | | | R772b | 1575 | CCCGCCAAGCACGUAUACU |
| F773 | 1550 | GGAGACCUACAAACUGAAGUGCAA | R773a | 1576 | CCGGAAGAGGAGUAGCUGAC |
| | | | R773b | 1577 | CUCCUAGAGUUUUUCCAAGAACCAAGU |
| F774 | 1551 | CCAUGCAGAAUGCCACCAAGUA | R774 | 1578 | AU UUGCAGCUACUACUCUGAACUGAA |
| F775 | 1552 | CAGGCACUCCUUGGAGCAA | R775 | 1579 | UCAGUGGGAUUGUAACAACCAGAAAU |
| F776 | 1553 | CUGUUUGAAAUGAGCAGGCACU | R776 | 1580 | GCACUGUCACCCCUUCCUUG |
| F777 | 1554 | ACUGGAGGACCCGUCUUCU | | | |
| F778 | 1555 | AGACCUUAAGGGAACAGCUCUCAU | | | |
| F779 | 1556 | GUGGAGUCAUGCUUAUAUGGAGCAAA | R779 | 1581 | GCUCCAUCUGCAUGGCUUG |
| F780 | 1557 | GACAGAAAAAUAAUUCUGUGGGAUCAU | | | |
| F781 | 1558 | UCCUGAAAGAGAAAUAGAGGUUCCUGAU | | | |
| F782 | 1559 | GGTGGCCATAGGAACGCA | | | |
| F783 | 1560 | UGGAUGCAGAAACCAGAGAUCUAGU | | | |
| F784 | 1561 | CUGGUCCCCAGACAACAAGUAU | | | |
| F785 | 1562 | GAAGAUCAUGUGGCCUCAGUGAA | R780 | 1582 | GGGUUGUAGUCGGUCAUGAUGG |
| F786 | 1563 | GUCGAAAAUACCUUCAACACCCAAAUU | R781 | 1583 | CCUGGCCCUUGAAGCACUA |
| | | | R782 | 1584 | ACCCCAUCUUCCCCAUCCAU |
| F787 | 1564 | CCAAAACUGCAGACAAGCAUAAAGAUG | R786 | 1585 | CUACCUCACAGUGACUGCAGUUUA |
| | | | R787 | 1586 | AGAGAGGAUCAGCGAGAGUGG |
| F788 | 1565 | CAGGCAGAAGUUGAUCGACUCU | R788 | 1587 | GUCUCGUUGCCCAAAUUGAU |
| F789 | 1566 | AAAGAAGAGUGCACAAAUGUUAGAGGA | R789 | 1588 | AGUGUUUUCAUUCGAUUCCUGUCUUCU |
| F790 | 1567 | CCAGCUUCCUAUAACUUGGACGAU | | | |
| F791 | 1568 | GAACCACAUCAUGGUCUCUGUCU | R791 | 1589 | GGUGAUGCCGUGGUUGAUGU |
| F792 | 1569 | UCAUCGGGAAGACCUGGCUUA | R792 | 1590 | AGUUCUCGCUUCAGCACGAU |
| F793 | 1570 | GCUGCAGGACUAUGAGGAGAAGA | | | |
| F794 | 1571 | CUCCCAGAGACCAACGUUCA | R794 | 1591 | UGGCCAAGCAAUCUGCGUAU |
| F795 | 1572 | GGACCUGGACCGUGUCCUUA | R795 | 1592 | UGCCAGGAUCAUAGCGUUUACAG |
| F796 | 1573 | GGACCUGGACCGUGUCCUUA | R796a | 1593 | CUGGAGCAGGUCCACUAUAGGU |
| | | | R796b | 1594 | UCCUCACACCUGCUCCUCA |
| | | | R796c | 1595 | GCUGAUGGGUGGGCACUG |
| | | | R796d | 1596 | GGUCUACCAGGACUGUCCCU |
| F797 | 1760 | CCCUUCGUAGACAUAUAGCUGUUCUC | R797 | 1597 | GGAAGGCAGGAAGAUUUUCAAUCUC |
| F798 | 1761 | UGGUGCUAGUUGCAAAGACACAA | R798 | 1598 | CGUUUAUAAGCACUGUCACCCCUU |
| F799 | 1762 | AGCGACGCCAUUGCUCAU | | | |
| F800 | 1763 | CCUCAACCAUUUCCGGCAAAU | | | |
| F801 | 1764 | CCAGCUCCCUGCGAAGAG | R801 | 1599 | AGGAUGAUGGCACUGAACUCC |
| F802 | 1765 | AAUCCCUGCAGUAGAUACGAAGACUA | R802 | 1600 | CACGUUAGUUAGUGAGCCAGGUAAU |
| F803 | 1766 | AGACCUUGCAGAAAUAGGAAUUGCU | R803 | 1601 | CUCAGGGCUCUGCAGCUCC |
| F804 | | | R804 | 1602 | CCUCCGGAAGGUCAUCUCA |
| F805 | 1767 | AAAGAAAAGACAGUUGGAGGAAUCUGU | R805 | | |
| F806 | 1768 | GAAGAAAAUGAAAAGGAGUUAGCAGCAU | R806b | 1603 | CUCCUAGAGUUUUUCCAAGAACCAAGU |
| | | | R807 | 1604 | GAACCAAGUUCUUCCGAGGGAAU |
| F807 | 1769 | AGUGGCAAAAGAACUUCAGACUUUACA | | | |
| F808 | 1770 | GCGCUGCUCAGAAGCAAAA | | | |
| F809 | 1771 | GUAGAUCGCAUAAAGGAAGCAGUCA | R809 | 1605 | ACAGCGGCUGCGAUCACC |
| F810 | 1772 | GGAAGCAGUCAGGUCAAAGAAUAUGG | | | |
| F811 | | | R811 | 1606 | GCUGACUGCACAGGACAGG |
| F812 | 1773 | CAAGCAGAAACACUGUACAAAGAGAUU | | | |
| F813 | 1774 | GAGGGCGAGCUGCAUGAU | R813a | 1607 | CGAGACCCCAAAAGGUGUUUC |
| | | | R813b | 1608 | UCCACAUUUGUUGAGCACAAGGA |
| F814 | 1775 | CACAUCUUCAGGUGCUGGAUUUUUC | | | |
| F815 | 1776 | CUUUUGAAAAGCCAGUGAUGAUCUCAA | R815 | 1609 | CACCUUUAACUGCUUCAGGGUCAAUAU |
| F816 | 1777 | GCACCUUGACUUUAAGUGAGAGCA | R816 | 1610 | UGUUGUCCCGUGGCCAUU |
| F817 | 1778 | ACAGCACUGUUAUUACUACUUGGGUUUU | R817 | 1611 | GGCAUGAACCGUUCUGAGAUG |
| F818 | 1779 | CAAGCUCCUUACAUACCCAGCA | R818 | 1612 | CCAAAUUCGCCUUCUCCUAGAGU |
| F819 | 1780 | GCGUUUCCUCGCUUGCAUU | R819 | 1613 | CUCCUCUGCACCAAGGUAAACA |
| F820 | 1781 | CGGGCAGGAATCTGATGACTTT | R820 | 1614 | UCCCUUCUAGUAAUUUGGGAAUGCC |
| F821 | 1782 | GCAGGGCAGCAACAUCUUUG | | | |
| F822 | 1783 | GGCUCCUGAGACCUUUGAUAACAUAAC | | | |
| F823 | 1784 | CGUGUGCUCCCUGGAUAUUCUUAGUA | R823 | 1615 | UCAGCUUUCUCCCACUGUAUUGAAUUUU |
| F824 | 1785 | CUGGCUCCGGGUGACAGC | R824 | 1616 | UCGGAAGGGCUGUGGAAUUG |
| | | | R824b | 1617 | CGUAGGCACACUCAAACAACGA |
| F825 | 1747 | CUGGCUCCGGGUGACAGC | R825 | 1618 | CUGAUUUCUGAACAUGGACUGUGG |
| F826 | 1748 | GACUCCCAUGACCCCCAUC | R826 | 1619 | ACGAAGUGCAAUGGUCUUUAGGU |
| F827 | 1749 | AAAAAUGUUAUGUCAGCGUUUGGCUUAA | | | |
| F828 | 1750 | GUAGGCGCGAGCUAAGCA | R828 | 1620 | GUGAGUCAUUUGUCUUGCUUUUGGU |
| F829 | 1751 | CAGGUCAUAUUGAACAUUCCAGAUACCU | | | |
| F830 | 1752 | GGUCCUGACGCAGGCUUC | | | |
| F829 | 1621 | GACAGUCUGAAUCAUGUCCUUCAGU | | | |
| F830 | 1622 | GGGCUGCCCACCAUCUUC | | | |
| F831 | 1623 | UCAGCCUGAUAGUCUGGUACAAACU | | | |
| F831 | 1753 | GUACCUGCAUCAACCCCUCUAA | | | |
| F832 | 1754 | CAGAGACCCGUGCUGAGUUU | | | |
| F833 | 1755 | GGAGAGAAGAGUGCACAAUACCA | R833 | 1624 | CCUCCACCUUGGGCUACUCA |
| F834 | 1756 | CCUGUAAUCCCUGCACUUUAGGA | R834 | 1625 | GGGUGAGCCUUGACACACA |
| F835 | 1757 | ACUUUCCAGUUGAGCAUCCCAAAUU | R835 | 1626 | CAGGGAUCAGUUCAGCUGUACC |
| F836 | 1758 | CGUCAGCGUGAUAUGUACCGUAUUUUAU | | | |
| F837 | 1759 | CACCUCAGUAAUAUGGAAGUCCAAGUU | | | |

TABLE E

| Primer | | |
|---|---|---|
| Name | SEQ ID | Primer Sequence |
| F838 | 1627 | UGGGCUCUGUAAAGAAUAGUG |
| F839 | 1628 | UGCACACUUGGACAGCAUUUC |
| F840 | 1629 | CCAGGACCAAUCUGGUCACAAACAUA |
| F841 | 1630 | GGUGGGAGGAAAAGACAUAGGAT |
| F842 | 1631 | CUCCAGAGAGAAAGAAUCAACAGG |
| F843 | 1632 | GCAUCCGUGACUCUCUGGAC |
| F844 | 1633 | UCAGUGAGCCAAUUCCUUGUAAUAACUC |
| F845 | 1634 | CAGAUCCCAAGCUCUUCCUCUT |
| F846 | 1635 | GUUCAUGCCACUGCACUUCACT |
| F847 | 1636 | GGUGCACCCAUUACCCGAAT |
| F848 | 1637 | UCCCCAUAUAAGUUCAAGCCUGUGT |
| F849 | 1638 | UUGUAUAGCUACAGUUUUUCUGUUGGT |
| F850 | 1639 | UAAAUAUGUGAGUCAAUUCCCCAAGUG |
| F851 | 1640 | GGCUAGAUUUUCCCCGAUGAUAGUAGT |
| F852 | 1641 | GGCUAGAUUUUCCCCUAUGAUAGUAGT |
| F853 | 1642 | CAGUAAGUUAAAGGAUUGCAGGAG |
| F854 | 1643 | UGUGUAUAUGCAUUUACCUGUGAGUAUG |
| F855 | 1644 | UGUAACAAGGGCUACAGGAAUCAT |
| F856 | 1645 | GGGCAUCUCUUAUACUCAUGAAAUCAA |
| F857 | 1646 | CUAUGCAGAAGAAUGAACCAGGGAT |
| F858 | 1647 | UGAUUCAUUUCCAUAGGGUAAGUGAAAA |
| F859 | 1648 | GACAUUAUCACCAAUUUUUCUAGACG |
| F860 | 1649 | GACAUUCUCACCAAUUUUUCUAGACG |
| F861 | 1650 | UGUGACAAGGGUGAUUUUCCUC |
| F862 | 1651 | CAUAAUUGUAUGAGCCACUUCCCAT |
| F863 | 1652 | AGACUCACAAUGUACAAAAGCCUAUT |
| F864 | 1653 | AAUAUAUAUAAAGGGUAUGAUAGAACACUUGUC |
| F865 | 1654 | GGCCUGGCAACUUAUAUGUAUUUUUGUAUT |
| F866 | 1655 | GGCCUGACAACUUAUAUGUAUUUUUGUAUT |
| F867 | 1656 | CCAUCCUUAUCUCUUGUGUAUCUAUUCAUUCAA |
| F868 | 1657 | GAUUUGUCUGUAAUUGCCAGCAAAA |
| F869 | 1658 | GAGCAAGACACCAUCUCAAGAA |
| F870 | 1659 | CAUGAUUGAUACAUGGAAAGAAUUCUCT |
| F871 | 1660 | ACCCAAAUCAACUCAACUCCAGUG |
| F872 | 1661 | UUAGAGCAUUUAAAGUAAGCCACAGUGT |
| F873 | 1662 | CUGUACACAGGGCUUCCGAGT |
| F874 | 1663 | UUUCAGGGCUGUGAUCACUAGCAC |
| F875 | 1664 | AGAUACAUAGGUUAGAUAGAGAUAGGACAGA |
| R838a | 1665 | AUCAGAGCUUAAACUGGGAAG |
| R838b | 1666 | AUCAGAGCUUAAACUGGGAAA |
| R839 | 1667 | GUCUCAGUUUUCCUACCUGUAAAAUGAAG |
| R840 | 1668 | ACUUAUUCUGACAGUUCUCUUUUUCCCT |
| R841 | 1669 | GGUGGCAGUGAGCUGUAACAGUA |
| R842 | 1670 | UCAGCCUCCAUAUCACUUGAGC |
| R843 | 1671 | AACUUGGGUUGAGCCAUAGGC |
| R844 | 1672 | CCUGGUUCCAUGGAUUCCACAUUAAGA |
| R845 | 1673 | GCGUUUGUGUGUGCAUCUGT |
| R846 | 1674 | UCUGGUGUGUGGAGAUGUCUUAC |
| R847a | 1675 | GGCUGCAAAAAGCUAUAAUUGUACC |
| R847b | 1676 | GGCUGCAAAAAGCUAUAACUGUACC |
| R848 | 1677 | UGUGUUAGUCAGGAUUCUUCAGAGA |
| R849 | 1678 | UUCAGUUAUAUGUGUAUAAAUGUGUGCAUUG |
| R850 | 1679 | CUCCAGAGACAGACUAAUAGGAGGUA |
| R851 | 1680 | CCUGUGCCCAAGUUGAGAGAAT |
| R853 | 1681 | UAAUCCAGCUGUGGGAGGGA |
| R854 | 1682 | GGUGCUAGGUGUGCUCAGGA |
| R855 | 1683 | CUUCACUCUCCUUCCCAAAUGUUUAUG |
| R856 | 1684 | CUAUGAUUCCCCCACUGCAGUC |
| R857 | 1685 | AGACCCCAAAAUUACUUGAGCCAAUUUA |
| R858 | 1686 | ACUUCAACUUCAAUUCAUCCACUGAAA |
| R859 | 1687 | UGCUUGCCUGUAUGAAAAUAUCUC |
| R861 | 1688 | UCCAAUCAUAGCCACAGUUUACAA |
| R862 | 1689 | GCACUCUUAUUCAUCUAGUUGCCUGT |
| R863a | 1690 | CAUCAUGUGAGCCAAUUCCUCUC |
| R863b | 1691 | CAUCAUGUGAGCCAAGUCCUCUC |
| R864a | 1692 | UUGCACCAAAUAUUGGUAAUUAAAUGUUUACT |
| R864b | 1693 | UUGCACCACAUAUUGGUAAUUAAAUGUUUACT |
| R865 | 1694 | CACUGUAUCGUAUCCCAUUGCG |
| R867 | 1695 | UUGCAAGCAAUUGCCAUAGAGGGA |
| R868 | 1696 | ACAGAUUAAACUGUAACCAAAAUAAAAUUAGGC |
| R869a | 1697 | UGCCUAACCUAUGGUCAUAACG |
| R869b | 1698 | UGCCUAACCUAUGGUCAUACCG |
| R870 | 1699 | CCCAGGAGGUGGAGAUUGAA |
| R871 | 1700 | UCCAUGUACUUUGUCCAAUGCUGA |
| R872 | 1701 | UGUCAACACGAUUAACAUGCAAAGA |
| R873 | 1702 | CAAAAUUCAAAGGGUAUCUGGGCUCT |
| R874 | 1703 | UGUGCGCUGGUCUUACUCCUGUT |
| R875 | 1704 | GCCCUAGUGGAUGAUAAGAAUAAUCAG |

The application's sequence listing, which the Patent Office published only in electronic form, follows.

SEQUENCE LISTING (1785 sequences)

SEQ ID NO: 1 - DNA, 50 bp, synthetic construct
  misc_feature 1..50: note = Synthetic DNA, Forward Adaptor
  misc_difference 21..23: note = n is a, c, g, t or u
  misc_difference 27..29: note = n is a, c, g, t or u
  modified_base 20: mod_base = OTHER; note = uracil
  modified_base 33: mod_base = OTHER; note = uracil
  modified_base 42: mod_base = OTHER; note = uracil
  modified_base 47: mod_base = OTHER; note = uracil
  source 1..50: mol_type = other DNA
tctgtacggtgacaaggcgtnnnactnnntgatgaggaccgtcgcttggt

SEQ ID NO: 2 - DNA, 61 bp, synthetic construct
  misc_feature 1..61: note = Synthetic DNA, Rev Adaptor B
  misc_difference 22..24: note = n is a, c, g, t or u
  misc_difference 28..30: note = n is a, c, g, t or u
  modified_base 21: mod_base = OTHER; note = uracil
  modified_base 34: mod_base = OTHER; note = uracil
  modified_base 44: mod_base = OTHER; note = uracil
  modified_base 59: mod_base = OTHER; note = uracil
  source 1..61: mol_type = other DNA
ctctatgggcagtcggtgattnnnactnnntgatccttctgcatggtattctttctcttcc

SEQ ID NO: 3 - DNA, 60 bp, synthetic construct
  misc_feature 1..60: note = Synthetic DNA, Rev Adaptor C
  misc_difference 21..23: note = n is a, c, g, t or u
  misc_difference 27..29: note = n is a, c, g, t or u
  modified_base 20: mod_base = OTHER; note = uracil
  modified_base 33: mod_base = OTHER; note = uracil
  modified_base 43: mod_base = OTHER; note = uracil
  modified_base 58: mod_base = OTHER; note = uracil
  source 1..60: mol_type = other DNA
tctagtcggtcagtcacggtnnnactnnntgatccttctgcatggtattctttctcttcc

SEQ ID NO: 4 - DNA, 60 bp, synthetic construct
  misc_feature 1..60: note = Synthetic DNA, Rev Adaptor D
  misc_difference 21..23: note = n is a, c, g, t or u
  misc_difference 27..29: note = n is a, c, g, t or u
  modified_base 20: mod_base = OTHER; note = uracil
  modified_base 33: mod_base = OTHER; note = uracil
  modified_base 43: mod_base = OTHER; note = uracil
  modified_base 58: mod_base = OTHER; note = uracil
  source 1..60: mol_type = other DNA
tctagtgctgcagtcacggtnnnactnnntgatccttctgcatggtattctttctcttcc

SEQ ID NO: 5 - DNA, 60 bp, synthetic construct
  misc_feature 1..60: note = Synthetic DNA, Rev Adaptor E
  misc_difference 21..23: note = n is a, c, g, t or u
  misc_difference 27..29: note = n is a, c, g, t or u
  modified_base 20: mod_base = OTHER; note = uracil
  modified_base 33: mod_base = OTHER; note = uracil
  modified_base 43: mod_base = OTHER; note = uracil
  modified_base 58: mod_base = OTHER; note = uracil
  source 1..60: mol_type = other DNA
tgacaaggcgtagtcacggtnnnactnnntgatccttctgcatggtattctttctcttcc

SEQ ID NO: 6 - DNA, 19 bp, synthetic construct
  misc_feature 1..19: note = Synthetic Primer, Forward
  source 1..19: mol_type = other DNA
tctgtacggtgacaaggcg

SEQ ID NO: 7 - DNA, 20 bp, synthetic construct
  misc_feature 1..20: note = Synthetic Primer, Reverse
  source 1..20: mol_type = other DNA
ctctatgggcagtcggtgat

SEQ ID NO: 8 - DNA, 22 bp, synthetic construct
  misc_feature 1..22: note = Synthetic DNA primer, F1
  modified_base 13: mod_base = OTHER; note = uracil
  modified_base 20: mod_base = OTHER; note = uracil
  source 1..22: mol_type = other DNA
gctcccaggcacttgatgatac

SEQ ID NO: 9 - DNA, 23 bp, synthetic construct
  misc_feature 1..23: note = Synthetic DNA primer, F2
  modified_base 11: mod_base = OTHER; note = uracil
  modified_base 21: mod_base = OTHER; note = uracil
  source 1..23: mol_type = other DNA
tgttgccatttcagggtttctga

SEQ ID NO: 10 - RNA, 25 nt, synthetic construct
  misc_feature 1..25: note = Synthetic Primer, F3
  source 1..25: mol_type = other RNA
accaatgcgaggaagaaaaacaatc

SEQ ID NO: 11 - DNA, 24 bp, synthetic construct
  misc_feature 1..24: note = Synthetic DNA primer, F4
  modified_base 10: mod_base = OTHER; note = uracil
  modified_base 20: mod_base = OTHER; note = uracil
  source 1..24: mol_type = other DNA
tcttcagaatcttgttggctgcat

SEQ ID NO: 12 - DNA, 23 bp, synthetic construct
  misc_feature 1..23: note = Synthetic DNA primer, F5
  modified_base 10: mod_base = OTHER; note = uracil
  modified_base 21: mod_base = OTHER; note = uracil
  source 1..23: mol_type = other DNA
agagttgcatccttcccttctct

SEQ ID NO: 13 - DNA, 21 bp, synthetic construct
  misc_feature 1..21: note = Synthetic DNA primer, F6
  modified_base 7: mod_base = OTHER; note = uracil
  modified_base 20: mod_base = OTHER; note = uracil
  source 1..21: mol_type = other DNA
ctggcatgacgcagtttcttc

SEQ ID NO: 14 - DNA, 25 bp, synthetic construct
  misc_feature 1..25: note = Synthetic DNA primer, F7
  modified_base 17: mod_base = OTHER; note = uracil
  modified_base 22: mod_base = OTHER; note = uracil
  source 1..25: mol_type = other DNA
gatcaaagagacgaagtctcttgca

SEQ ID NO: 15 - DNA, 22 bp, synthetic construct
  misc_feature 1..22: note = Synthetic DNA primer, F8
  modified_base 7: mod_base = OTHER; note = uracil
  modified_base 19: mod_base = OTHER; note = uracil
  source 1..22: mol_type = other DNA
cttgcctagacagcaccgtaat

SEQ ID NO: 16 - DNA, 23 bp, synthetic construct
  misc_feature 1..23: note = Synthetic DNA primer, F9
  modified_base 11: mod_base = OTHER; note = uracil
  modified_base 22: mod_base = OTHER; note = uracil
  source 1..23: mol_type = other DNA
tggtttctggtgggaccattatg

SEQ ID NO: 17 - DNA, 27 bp, synthetic construct
  misc_feature 1..27: note = Synthetic DNA primer, F10
  modified_base 17: mod_base = OTHER; note = uracil
  modified_base 23: mod_base = OTHER; note = uracil
  source 1..27: mol_type = other DNA
ttgaaagagaacacacttactctccac

SEQ ID NO: 18 - DNA, 27 bp, synthetic construct
  misc_feature 1..27: note = Synthetic DNA primer, F11
  modified_base 12: mod_base = OTHER; note = uracil
  modified_base 24: mod_base = OTHER; note = uracil
  source 1..27: mol_type = other DNA
ctctaccagagttaatcaactgatgca

SEQ ID NO: 19 - DNA, 26 bp, synthetic construct
  misc_feature 1..26: note = Synthetic DNA primer, F12
  modified_base 13: mod_base = OTHER; note = uracil
  modified_base 24: mod_base = OTHER; note = uracil
  source 1..26: mol_type = other DNA
tatcaactgtccttgttggcaaatca

SEQ ID NO: 20 - DNA, 27 bp, synthetic construct
  misc_feature 1..27: note = Synthetic DNA primer, F13
  modified_base 11: mod_base = OTHER; note = uracil
  modified_base 23: mod_base = OTHER; note = uracil
  source 1..27: mol_type = other DNA
gcaaatgacttgctattattgatggca

SEQ ID NO: 21 - DNA, 28 bp, synthetic construct
  misc_feature 1..28: note = Synthetic DNA primer, F14
  modified_base 12: mod_base = OTHER; note = uracil
  modified_base 25: mod_base = OTHER; note = uracil
  source 1..28: mol_type = other DNA
gtgggatcatattcatctacaaagtggt

SEQ ID NO: 22 - DNA, 20 bp, synthetic construct
  misc_feature 1..20: note = Synthetic DNA primer, F15
  modified_base 9: mod_base = OTHER; note = uracil
  modified_base 19: mod_base = OTHER; note = uracil
  source 1..20: mol_type = other DNA
ggaggtcatggcatcgagtt

SEQ ID NO: 23 - DNA, 22 bp, synthetic construct
  misc_feature 1..22: note = Synthetic DNA primer, F16
  modified_base 10: mod_base = OTHER; note = uracil
  modified_base 17: mod_base = OTHER; note = uracil
  source 1..22: mol_type = other DNA
gtgaggcagtctttactcacct

SEQ ID NO: 24 - DNA, 22 bp, synthetic construct
  misc_feature 1..22: note = Synthetic DNA primer, F17
  modified_base 9: mod_base = OTHER; note = uracil
  modified_base 17: mod_base = OTHER; note = uracil
  source 1..22: mol_type = other DNA
gggaaatgtgagcccttgagat

SEQ ID NO: 25 - DNA, 22 bp, synthetic construct
  misc_feature 1..22: note = Synthetic DNA primer, F18
  modified_base 9: mod_base = OTHER; note = uracil
  modified_base 21: mod_base = OTHER; note = uracil
  source 1..22: mol_type = other DNA
actcttgctccttccatccttg

SEQ ID NO: 26 - DNA, 22 bp, synthetic construct
  misc_feature 1..22: note = Synthetic DNA primer, F19
  modified_base 6: mod_base = OTHER; note = uracil
  modified_base 21: mod_base = OTHER; note = uracil
  source 1..22: mol_type = other DNA
cccaatgcagcgaacaatgttc

SEQ ID NO: 27 - DNA, 22 bp, synthetic construct
  misc_feature 1..22: note = Synthetic DNA primer, F20
  modified_base 10: mod_base = OTHER; note = uracil
  modified_base 15: mod_base = OTHER; note = uracil
  source 1..22: mol_type = other DNA
gatcagggcttccatgaggaaa

SEQ ID NO: 28 - DNA, 24 bp, synthetic construct
  misc_feature 1..24: note = Synthetic DNA primer, F21
  modified_base 9: mod_base = OTHER; note = uracil
  modified_base 21: mod_base = OTHER; note = uracil
  source 1..24: mol_type = other DNA
ctcaagagtgagccacttcttacc

SEQ ID NO: 29 - DNA, 33 bp, synthetic construct
  misc_feature 1..33: note = Synthetic DNA primer, F22
  modified_base 14: mod_base = OTHER; note = uracil
  modified_base 31: mod_base = OTHER; note = uracil
  source 1..33: mol_type = other DNA
agaataaaacacatacaagttggaaatttctgg

SEQ ID NO: 30 - DNA, 22 bp, synthetic construct
  misc_feature 1..22: note = Synthetic DNA primer, F23
  modified_base 4: mod_base = OTHER; note = uracil
  modified_base 19: mod_base = OTHER; note = uracil
  source 1..22: mol_type = other DNA
acctgagccaaggacttttacc

SEQ ID NO: 31 - DNA, 27 bp, synthetic construct
  misc_feature 1..27: note = Synthetic DNA primer, F24
  modified_base 12: mod_base = OTHER; note = uracil
  modified_base 21: mod_base = OTHER; note = uracil
  source 1..27: mol_type = other DNA
tgtcaattagctggaacatctgaaact

SEQ ID NO: 32 - DNA, 24 bp, synthetic construct
  misc_feature 1..24: note = Synthetic DNA primer, F25
  modified_base 10: mod_base = OTHER; note = uracil
  modified_base 21: mod_base = OTHER; note = uracil
  source 1..24: mol_type = other DNA
gtgccctattacctcaatcatcct

SEQ ID NO: 33 - DNA, 22 bp, synthetic construct
  misc_feature 1..22: note = Synthetic DNA primer, F26
  modified_base 18: mod_base = OTHER; note = uracil
  modified_base 21: mod_base = OTHER; note = uracil
  source 1..22: mol_type = other DNA
ccagacagaaaagcggctgtta

SEQ ID NO: 34 - DNA, 32 bp, synthetic construct
  misc_feature 1..32: note = Synthetic DNA primer, F27
  modified_base 15: mod_base = OTHER; note = uracil
  modified_base 30: mod_base = OTHER; note = uracil
  source 1..32: mol_type = other DNA
cctagtagaatgtttactaccaaatggaatga

SEQ ID NO: 35 - DNA, 27 bp, synthetic construct
  misc_feature 1..27: note = Synthetic DNA primer, F28
  modified_base 8: mod_base = OTHER; note = uracil
  modified_base 26: mod_base = OTHER; note = uracil
  source 1..27: mol_type = other DNA
tttttgatgaaacaagacgactttgtg

SEQ ID NO: 36 - DNA, 27 bp, synthetic construct
  misc_feature 1..27: note = Synthetic DNA primer, F29
  modified_base 7: mod_base = OTHER; note = uracil
  modified_base 22: mod_base = OTHER; note = uracil
  source 1..27: mol_type = other DNA
cacagctacaccatatatgaatggaga

SEQ ID NO: 37 - DNA, 29 bp, synthetic construct
  misc_feature 1..29: note = Synthetic DNA primer, F30
  modified_base 10: mod_base = OTHER; note = uracil
  modified_base 23: mod_base = OTHER; note = uracil
  source 1..29: mol_type = other DNA
gatctatgttcgaacaggtatctaccatg

SEQ ID NO: 38 - DNA, 28 bp, synthetic construct
  misc_feature 1..28: note = Synthetic DNA primer, F31
  modified_base 12: mod_base = OTHER; note = uracil
  modified_base 27: mod_base = OTHER; note = uracil
  source 1..28: mol_type = other DNA
gggaagaaaagtgttttgaaatgtgttt

SEQ ID NO: 39 - DNA, 24 bp, synthetic construct
  misc_feature 1..24: note = Synthetic DNA primer, F32
  modified_base 11: mod_base = OTHER; note = uracil
  modified_base 22: mod_base = OTHER; note = uracil
  source 1..24: mol_type = other DNA
tttgaatctttggccagtacctca

SEQ ID NO: 40 - DNA, 31 bp, synthetic construct
  misc_feature 1..31: note = Synthetic DNA primer, F33
  modified_base 8: mod_base = OTHER; note = uracil
  modified_base 22: mod_base = OTHER; note = uracil
  source 1..31: mol_type = other DNA
gactagctagagacaatgaattaagggaaaa

SEQ ID NO: 41 - DNA, 27 bp, synthetic construct
  misc_feature 1..27: note = Synthetic DNA primer, F34
  modified_base 14: mod_base = OTHER; note = uracil
  modified_base 23: mod_base = OTHER; note = uracil
  source 1..27: mol_type = other DNA
ctgagatgcacaataaaacagttagcc

SEQ ID NO: 42 - DNA, 26 bp, synthetic construct
  misc_feature 1..26: note = Synthetic DNA primer, F35
  modified_base 5: mod_base = OTHER; note = uracil
  modified_base 8: mod_base = OTHER; note = uracil
  source 1..26: mol_type = other DNA
gacattctcaaacaggagaagaagga

SEQ ID NO: 43 - DNA, 25 bp, synthetic construct
  misc_feature 1..25: note = Synthetic DNA primer, F36
  modified_base 13: mod_base = OTHER; note = uracil
  modified_base 23: mod_base = OTHER; note = uracil
  source 1..25: mol_type = other DNA
tcttttctcaagttggcctgaatca

SEQ ID NO: 44 - DNA, 30 bp, synthetic construct
  misc_feature 1..30: note = Synthetic DNA primer, F37
  modified_base 12: mod_base = OTHER; note = uracil
  modified_base 27: mod_base = OTHER; note = uracil
  source 1..30: mol_type = other DNA
caatcttttgatgacattgcatacattcga

SEQ ID NO: 45 - DNA, 21 bp, synthetic construct
  misc_feature 1..21: note = Synthetic DNA primer, F38
  modified_base 12: mod_base = OTHER; note = uracil
  modified_base 20: mod_base = OTHER; note = uracil
  source 1..21: mol_type = other DNA
gtatgcaggcatcctcagcta

SEQ ID NO: 46 - DNA, 20 bp, synthetic construct
  misc_feature 1..20: note = Synthetic DNA primer, F39
  modified_base 2: mod_base = OTHER; note = uracil
  modified_base 5: mod_base = OTHER; note = uracil
  source 1..20: mol_type = other DNA
ctggtgaccgaggacaacgt

SEQ ID NO: 47 - DNA, 20 bp, synthetic construct
  misc_feature 1..20: note = Synthetic DNA primer, F40
  modified_base 5: mod_base = OTHER; note = uracil
  modified_base 13: mod_base = OTHER; note = uracil
  source 1..20: mol_type = other DNA
gtcctgggagtctcaggaca

SEQ ID NO: 48 - DNA, 22 bp, synthetic construct
  misc_feature 1..22: note = Synthetic DNA primer, F41
  modified_base 10: mod_base = OTHER; note = uracil
  modified_base 21: mod_base = OTHER; note = uracil
  source 1..22: mol_type = other DNA
ccagttacctgtcctggtcatt

SEQ ID NO: 49 - DNA, 26 bp, synthetic construct
  misc_feature 1..26: note = Synthetic DNA primer, F42
  modified_base 15: mod_base = OTHER; note = uracil
  modified_base 24: mod_base = OTHER; note = uracil
  source 1..26: mol_type = other DNA
agtgaaaaacaagctctcatgtctga

SEQ ID NO: 50 - DNA, 29 bp, synthetic construct
  misc_feature 1..29: note = Synthetic DNA primer, F43
  modified_base 11: mod_base = OTHER; note = uracil
  modified_base 27: mod_base = OTHER; note = uracil
  source 1..29: mol_type = other DNA
ggaaaaattgtgaagatctgtgactttgg

SEQ ID NO: 51 - DNA, 23 bp, synthetic construct
  misc_feature 1..23: note = Synthetic DNA primer, F44
  modified_base 13: mod_base = OTHER; note = uracil
  modified_base 22: mod_base = OTHER; note = uracil
  source 1..23: mol_type = other DNA
agcactctgacatatggccattt

SEQ ID NO: 52 - DNA, 23 bp, synthetic construct
  misc_feature 1..23: note = Synthetic DNA primer, F45
  modified_base 9: mod_base = OTHER; note = uracil
  modified_base 22: mod_base = OTHER; note = uracil
  source 1..23: mol_type = other DNA
ggcacggttgaatgtaaggctta

SEQ ID NO: 53 - DNA, 24 bp, synthetic construct
  misc_feature 1..24: note = Synthetic DNA primer, F46
  modified_base 15: mod_base = OTHER; note = uracil
  modified_base 19: mod_base = OTHER; note = uracil
  source 1..24: mol_type = other DNA
cccacagaaacccatgtatgaagt

SEQ ID NO: 54 - DNA, 23 bp, synthetic construct
  misc_feature 1..23: note = Synthetic DNA primer, F47
  modified_base 2: mod_base = OTHER; note = uracil
  modified_base 20: mod_base = OTHER; note = uracil
  source 1..23: mol_type = other DNA
ttgacagaacgggaagccctcat

SEQ ID NO: 55 - DNA, 23 bp, synthetic construct
  misc_feature 1..23: note = Synthetic DNA primer, F48
  modified_base 10: mod_base = OTHER; note = uracil
  modified_base 18: mod_base = OTHER; note = uracil
  source 1..23: mol_type = other DNA
ccttactcatggtcggatcacaa

SEQ ID NO: 56 - DNA, 26 bp, synthetic construct
  misc_feature 1..26: note = Synthetic DNA primer, F49
  modified_base 14: mod_base = OTHER; note = uracil
  modified_base 25: mod_base = OTHER; note = uracil
  source 1..26: mol_type = other DNA
ccaatattatggatcccaactgccta

SEQ ID NO: 57 - DNA, 26 bp, synthetic construct
  misc_feature 1..26: note = Synthetic DNA primer, F50
  modified_base 11: mod_base = OTHER; note = uracil
  modified_base 21: mod_base = OTHER; note = uracil
  source 1..26: mol_type = other DNA
gctactttgatttctccacttccaac

SEQ ID NO: 58 - DNA, 22 bp, synthetic construct
  misc_feature 1..22: note = Synthetic DNA primer, F51
  modified_base 8: mod_base = OTHER; note = uracil
  modified_base 19: mod_base = OTHER; note = uracil
  source 1..22: mol_type = other DNA
aaaggcatggagcatctgtaca

SEQ ID NO: 59 - DNA, 24 bp, synthetic construct
  misc_feature 1..24: note = Synthetic DNA primer, F52
  modified_base 10: mod_base = OTHER; note = uracil
  modified_base 19: mod_base = OTHER; note = uracil
  source 1..24: mol_type = other DNA
gttatgtcctcattgccctcaaca

SEQ ID NO: 60 - DNA, 22 bp, synthetic construct
  misc_feature 1..22: note = Synthetic DNA primer, F53
  modified_base 11: mod_base = OTHER; note = uracil
  modified_base 19: mod_base = OTHER; note = uracil
  source 1..22: mol_type = other DNA
cgagggcaaatacagctttggt

SEQ ID NO: 61 - DNA, 29 bp, synthetic construct
  misc_feature 1..29: note = Synthetic DNA primer, F54
  modified_base 10: mod_base = OTHER; note = uracil
  modified_base 20: mod_base = OTHER; note = uracil
  source 1..29: mol_type = other DNA
tgatggagatgtgataatttcaggaaaca

SEQ ID NO: 62 - DNA, 26 bp, synthetic construct
  misc_feature 1..26: note = Synthetic DNA primer, F55
  modified_base 11: mod_base = OTHER; note = uracil
  modified_base 23: mod_base = OTHER; note = uracil
  source 1..26: mol_type = other DNA
gagacatgcatgaacatttttctcca

SEQ ID NO: 63 - DNA, 22 bp, synthetic construct
  misc_feature 1..22: note = Synthetic DNA primer, F56
  modified_base 7: mod_base = OTHER; note = uracil
  modified_base 16: mod_base = OTHER; note = uracil
  source 1..22: mol_type = other DNA
gcctcttacacccagtggagaa

SEQ ID NO: 64 - DNA, 24 bp, synthetic construct
  misc_feature 1..24: note = Synthetic DNA primer, F57
  modified_base 8: mod_base = OTHER; note = uracil
  modified_base 17: mod_base = OTHER; note = uracil
  source 1..24: mol_type = other DNA
ccttctctctctgtcatagggact

SEQ ID NO: 65 - DNA, 21 bp, synthetic construct
  misc_feature 1..21: note = Synthetic DNA primer, F58
  modified_base 13: mod_base = OTHER; note = uracil
  modified_base 20: mod_base = OTHER; note = uracil
  source 1..21: mol_type = other DNA
ctccaggaagcctacgtgatg

SEQ ID NO: 66 - DNA, 23 bp, synthetic construct
  misc_feature 1..23: note = Synthetic DNA primer, F59
  modified_base 9: mod_base = OTHER; note = uracil
  modified_base 15: mod_base = OTHER; note = uracil
  source 1..23: mol_type = other DNA
caggaacgtactggtgaaaacac

SEQ ID NO: 67 - DNA, 22 bp, synthetic construct
  misc_feature 1..22: note = Synthetic DNA primer, F60
  modified_base 10: mod_base = OTHER; note = uracil
  modified_base 21: mod_base = OTHER; note = uracil
  source 1..22: mol_type = other DNA
gcttgtaagtgcccgaagtgta

SEQ ID NO: 68 - DNA, 23 bp, synthetic construct
  misc_feature 1..23: note = Synthetic DNA primer, F61
  modified_base 9: mod_base = OTHER; note = uracil
  modified_base 22: mod_base = OTHER; note = uracil
  source 1..23: mol_type = other DNA
cgcagtgctaaccaagttctttc

SEQ ID NO: 69 - DNA, 23 bp, synthetic construct
  misc_feature 1..23: note = Synthetic DNA primer, F62
  modified_base 10: mod_base = OTHER; note = uracil
  modified_base 20: mod_base = OTHER; note = uracil
  source 1..23: mol_type = other DNA
cagtcaaggttgctgattttggt

SEQ ID NO: 70 - DNA, 20 bp, synthetic construct
  misc_feature 1..20: note = Synthetic DNA primer, F63
  modified_base 9: mod_base = OTHER; note = uracil
  modified_base 19: mod_base = OTHER; note = uracil
  source 1..20: mol_type = other DNA
cgaatcgctaccctgctgtt

SEQ ID NO: 71 - DNA, 17 bp, synthetic construct
  misc_feature 1..17: note = Synthetic DNA primer, F64
  modified_base 7: mod_base = OTHER; note = uracil
  modified_base 12: mod_base = OTHER; note = uracil
  source 1..17: mol_type = other DNA
taccgataccgtgcggg

SEQ ID NO: 72 - DNA, 22 bp, synthetic construct
  misc_feature 1..22: note = Synthetic DNA primer, F65
  modified_base 7: mod_base = OTHER; note = uracil
  modified_base 21: mod_base = OTHER; note = uracil
  source 1..22: mol_type = other DNA
ctgtcctccacaggcatttttg

SEQ ID NO: 73 - DNA, 22 bp, synthetic construct
  misc_feature 1..22: note = Synthetic DNA primer, F66
  modified_base 8: mod_base = OTHER; note = uracil
  modified_base 19: mod_base = OTHER; note = uracil
  source 1..22: mol_type = other DNA
ccatccctgactgtgagatcaa

SEQ ID NO: 74 - DNA, 29 bp, synthetic construct
  misc_feature 1..29: note = Synthetic DNA primer, F67
  modified_base 13: mod_base = OTHER; note = uracil
  modified_base 26: mod_base = OTHER; note = uracil
  source 1..29: mol_type = other DNA
tcagtggaaaaatagcctcaattcttacc

SEQ ID NO: 75 - DNA, 29 bp, synthetic construct
  misc_feature 1..29: note = Synthetic DNA primer, F68
  modified_base 11: mod_base = OTHER; note = uracil
  modified_base 21: mod_base = OTHER; note = uracil
  source 1..29: mol_type = other DNA
tattatgacttgtcacaatgtcaccacat

SEQ ID NO: 76 - DNA, 26 bp, synthetic construct
  misc_feature 1..26: note = Synthetic DNA primer, F69
  modified_base 5: mod_base = OTHER; note = uracil
  modified_base 17: mod_base = OTHER; note = uracil
  source 1..26: mol_type = other DNA
ttccttagtctttctttgaagcagca

SEQ ID NO: 77 - DNA, 26 bp, synthetic construct
  misc_feature 1..26: note = Synthetic DNA primer, F70
  modified_base 7: mod_base = OTHER; note = uracil
  modified_base 22: mod_base = OTHER; note = uracil
  source 1..26: mol_type = other DNA
tctgactccacgagaacttgatcata

SEQ ID NO: 78 - DNA, 25 bp, synthetic construct
  misc_feature 1..25: note = Synthetic DNA primer, F71
  modified_base 8: mod_base = OTHER; note = uracil
  modified_base 22: mod_base = OTHER; note = uracil
  source 1..25: mol_type = other DNA
caaggcataaaagctgggaaatagg

SEQ ID NO: 79 - DNA, 19 bp, synthetic construct
  misc_feature 1..19: note = Synthetic DNA primer, F72
  modified_base 6: mod_base = OTHER; note = uracil
  modified_base 13: mod_base = OTHER; note = uracil
  source 1..19: mol_type = other DNA
ggctatggcacctgcaact

SEQ ID NO: 80 - DNA, 20 bp, synthetic construct
  misc_feature 1..20: note = Synthetic DNA primer, F73
  modified_base 8: mod_base = OTHER; note = uracil
  modified_base 15: mod_base = OTHER; note = uracil
  source 1..20: mol_type = other DNA
ccacagatccactgtgcgac

SEQ ID NO: 81 - DNA, 22 bp, synthetic construct
  misc_feature 1..22: note = Synthetic DNA primer, F74
  modified_base 12: mod_base = OTHER; note = uracil
  modified_base 20: mod_base = OTHER; note = uracil
  source 1..22: mol_type = other DNA
ccatcctgacctggtatggtca

SEQ ID NO: 82 - DNA, 20 bp, synthetic construct
  misc_feature 1..20: note = Synthetic DNA primer, F75
  modified_base 9: mod_base = OTHER; note = uracil
  modified_base 19: mod_base = OTHER; note = uracil
  source 1..20: mol_type = other DNA
cagctcgttcatcgggactt

SEQ ID NO: 83 - DNA, 27 bp, synthetic construct
  misc_feature 1..27: note = Synthetic DNA primer, F76
  modified_base 10: mod_base = OTHER; note = uracil
  modified_base 23: mod_base = OTHER; note = uracil
  source 1..27: mol_type = other DNA
cctccttcctagagagttagagtaact

SEQ ID NO: 84 - DNA, 24 bp, synthetic construct
  misc_feature 1..24: note = Synthetic DNA primer, F77
  modified_base 12: mod_base = OTHER; note = uracil
  modified_base 23: mod_base = OTHER; note = uracil
  source 1..24: mol_type = other DNA
cactgtgttactgccatcgactta

SEQ ID NO: 85 - DNA, 28 bp, synthetic construct
  misc_feature 1..28: note = Synthetic DNA primer, F78
  modified_base 14: mod_base = OTHER; note = uracil
  modified_base 25: mod_base = OTHER; note = uracil
  source 1..28: mol_type = other DNA
gattcaatcaaactgcagagtatttggg

SEQ ID NO: 86 - DNA, 22 bp, synthetic construct
  misc_feature 1..22: note = Synthetic DNA primer, F79
  modified_base 11: mod_base = OTHER; note = uracil
  modified_base 20: mod_base = OTHER; note = uracil
  source 1..22: mol_type = other DNA
ggcttcttggtcgtgttcttca

SEQ ID NO: 87 - DNA, 22 bp, synthetic construct
  misc_feature 1..22: note = Synthetic DNA primer, F80
  modified_base 8: mod_base = OTHER; note = uracil
  modified_base 19: mod_base = OTHER; note = uracil
  source 1..22: mol_type = other DNA
cccagcgtcctcaaaagttaca

SEQ ID NO: 88 - DNA, 20 bp, synthetic construct
  misc_feature 1..20: note = Synthetic DNA primer, F81
  modified_base 8: mod_base = OTHER; note = uracil
  modified_base 13: mod_base = OTHER; note = uracil
  source 1..20: mol_type = other DNA
ctctacgtctcctccgacca

SEQ ID NO: 89 - DNA, 22 bp, synthetic construct
  misc_feature 1..22: note = Synthetic DNA primer, F82
  modified_base 11: mod_base = OTHER; note = uracil
  modified_base 20: mod_base = OTHER; note = uracil
  source 1..22: mol_type = other DNA
cctgtactggtggatgtcctca

SEQ ID NO: 90 - DNA, 20 bp, synthetic construct
  misc_feature 1..20: note = Synthetic DNA primer, F83
  modified_base 9: mod_base = OTHER; note = uracil
  modified_base 18: mod_base = OTHER; note = uracil
  source 1..20: mol_type = other DNA
cgccaggctcacctctatag

SEQ ID NO: 91 - DNA, 29 bp, synthetic construct
  misc_feature 1..29: note = Synthetic DNA primer, F84
  modified_base 10: mod_base = OTHER; note = uracil
  modified_base 21: mod_base = OTHER; note = uracil
  source 1..29: mol_type = other DNA
tgtctttgctgatgtttcaataaaaggaa

SEQ ID NO: 92 - DNA, 22 bp, synthetic construct
  misc_feature 1..22: note = Synthetic DNA primer, F85
  modified_base 11: mod_base = OTHER; note = uracil
  modified_base 19: mod_base = OTHER; note = uracil
  source 1..22: mol_type = other DNA
catgtactggtccctcattgca

SEQ ID NO: 93 - DNA, 29 bp, synthetic construct
  misc_feature 1..29: note = Synthetic DNA primer, F86
  modified_base 13: mod_base = OTHER; note = uracil
  modified_base 26: mod_base = OTHER; note = uracil
  source 1..29: mol_type = other DNA
tacctctattgttggatcatattcgtcca

SEQ ID NO: 94 - DNA, 23 bp, synthetic construct
  misc_feature 1..23: note = Synthetic DNA primer, F87
  modified_base 10: mod_base = OTHER; note = uracil
  modified_base 19: mod_base = OTHER; note = uracil
  source 1..23: mol_type = other DNA
cagacactgtacaagctctacga

SEQ ID NO: 95 - DNA, 22 bp, synthetic construct
  misc_feature 1..22: note = Synthetic DNA primer, F88
  modified_base 6: mod_base = OTHER; note = uracil
  modified_base 17: mod_base = OTHER; note = uracil
  source 1..22: mol_type = other DNA
ctctgtcacagtggattcgaga

SEQ ID NO: 96 - DNA, 23 bp, synthetic construct
  misc_feature 1..23: note = Synthetic DNA primer, F89
  modified_base 4: mod_base = OTHER; note = uracil
  modified_base 12: mod_base = OTHER; note = uracil
  source 1..23: mol_type = other DNA
tccttccatagtgaccaagacca

SEQ ID NO: 97 - DNA, 22 bp, synthetic construct
  misc_feature 1..22: note = Synthetic DNA primer, F90
  modified_base 9: mod_base = OTHER; note = uracil
  modified_base 19: mod_base = OTHER; note = uracil
  source 1..22: mol_type = other DNA
ggttccattggtagctggtgat

SEQ ID NO: 98 - DNA, 25 bp, synthetic construct
  misc_feature 1..25: note = Synthetic DNA primer, F91
  modified_base 16: mod_base = OTHER; note = uracil
  modified_base 23: mod_base = OTHER; note = uracil
  source 1..25: mol_type = other DNA
tgtaaagagacagcctttcctctga

SEQ ID NO: 99 - DNA, 21 bp, synthetic construct
  misc_feature 1..21: note = Synthetic DNA primer, F92
  modified_base 5: mod_base = OTHER; note = uracil
  modified_base 8: mod_base = OTHER; note = uracil
  source 1..21: mol_type = other DNA
acactcttgagggccacaaag

SEQ ID NO: 100 - DNA, 20 bp, synthetic construct
  misc_feature 1..20: note = Synthetic DNA primer, F93
  modified_base 8: mod_base = OTHER; note = uracil
  modified_base 18: mod_base = OTHER; note = uracil
  source 1..20: mol_type = other DNA
ccgctccttgtagccaatga

SEQ ID NO: 101 - DNA, 21 bp, synthetic construct
  misc_feature 1..21: note = Synthetic DNA primer, F94
  modified_base 5: mod_base = OTHER; note = uracil
  modified_base 7: mod_base = OTHER; note = uracil
  source 1..21: mol_type = other DNA
ccactttggaacaggaccaac

SEQ ID NO: 102 - DNA, 24 bp, synthetic construct
  misc_feature 1..24: note = Synthetic DNA primer, F95
  modified_base 13: mod_base = OTHER; note = uracil
  modified_base 23: mod_base = OTHER; note = uracil
  source 1..24: mol_type = other DNA
ctttcttccacctttctccagcta

SEQ ID NO: 103 - DNA, 22 bp, synthetic construct
  misc_feature 1..22: note = Synthetic DNA primer, F96
  modified_base 9: mod_base = OTHER; note = uracil
  modified_base 19: mod_base = OTHER; note = uracil
  source 1..22: mol_type = other DNA
tcaagccctccaacatcctagt

SEQ ID NO: 104 - DNA, 22 bp, synthetic construct
  misc_feature 1..22: note = Synthetic DNA primer, R1
  modified_base 7: mod_base = OTHER; note = uracil
  modified_base 12: mod_base = OTHER; note = uracil
  source 1..22: mol_type = other DNA
acagaatcacatgccacacagt

SEQ ID NO: 105 - DNA, 27 bp, synthetic construct
  misc_feature 1..27: note = Synthetic DNA primer, R2
  modified_base 8: mod_base = OTHER; note = uracil
  modified_base 26: mod_base = OTHER; note = uracil
  source 1..27: mol_type = other DNA
ttccttctaaaaggccatgaagatctg

SEQ ID NO: 106 - DNA, 23 bp, synthetic construct
  misc_feature 1..23: note = Synthetic DNA primer, R3
  modified_base 12: mod_base = OTHER; note = uracil
  modified_base 16: mod_base = OTHER; note = uracil
  source 1..23: mol_type = other DNA
tctgaagaacatgtgtgagcaca

SEQ ID NO: 107 - DNA, 29 bp, synthetic construct
  misc_feature 1..29: note = Synthetic DNA primer, R4
  modified_base 12: mod_base = OTHER; note = uracil
  modified_base 28: mod_base = OTHER; note = uracil
  source 1..29: mol_type = other DNA
cccaacccacatttcctttatagatgttt

SEQ ID NO: 108 - DNA, 24 bp, synthetic construct
  misc_feature 1..24: note = Synthetic DNA primer, R5
  modified_base 14: mod_base = OTHER; note = uracil
  modified_base 18: mod_base = OTHER; note = uracil
  source 1..24: mol_type = other DNA
tgttccaacaggatctgtccaaaa

SEQ ID NO: 109 - DNA, 22 bp, synthetic construct
  misc_feature 1..22: note = Synthetic DNA primer, R6
  modified_base 11: mod_base = OTHER; note = uracil
  modified_base 21: mod_base = OTHER; note = uracil
  source 1..22: mol_type = other DNA
ccagtgtctgtccttgcctttc

SEQ ID NO: 110 - DNA, 28 bp, synthetic construct
  misc_feature 1..28: note = Synthetic DNA primer, R7
  modified_base 2: mod_base = OTHER; note = uracil
  modified_base 15: mod_base = OTHER; note = uracil
  source 1..28: mol_type = other DNA
ctatgacaagaaaatggacaccaacaag

SEQ ID NO: 111 - DNA, 23 bp, synthetic construct
  misc_feature 1..23: note = Synthetic DNA primer, R8
  modified_base 8: mod_base = OTHER; note = uracil
  modified_base 19: mod_base = OTHER; note = uracil
  source 1..23: mol_type = other DNA
aggaggataaagacctggtccat

SEQ ID NO: 112 - DNA, 22 bp, synthetic construct
  misc_feature 1..22: note = Synthetic DNA primer, R9
  modified_base 7: mod_base = OTHER; note = uracil
  modified_base 19: mod_base = OTHER; note = uracil
  source 1..22: mol_type = other DNA
gtcctctggatctcttcatgca

SEQ ID NO: 113 - DNA, 24 bp, synthetic construct
  misc_feature 1..24: note = Synthetic DNA primer, R10
  modified_base 13: mod_base = OTHER; note = uracil
  modified_base 23: mod_base = OTHER; note = uracil
  source 1..24: mol_type = other DNA
ctgagacattcctatgtcctgctc

SEQ ID NO: 114 - DNA, 25 bp, synthetic construct
  misc_feature 1..25: note = Synthetic DNA primer, R11
  modified_base 2: mod_base = OTHER; note = uracil
  modified_base 5: mod_base = OTHER; note = uracil
  source 1..25: mol_type = other DNA
ttgatacaaaacaagcccacgaact

SEQ ID NO: 115 - DNA, 30 bp, synthetic construct
  misc_feature 1..30: note = Synthetic DNA primer, R12
  modified_base 13: mod_base = OTHER; note = uracil
  modified_base 29: mod_base = OTHER; note = uracil
  source 1..30: mol_type = other DNA
ccagcctaatcttgtttttcttatgttctg

SEQ ID NO: 116 - DNA, 28 bp, synthetic construct
  misc_feature 1..28: note = Synthetic DNA primer, R13
  modified_base 12: mod_base = OTHER; note = uracil
  modified_base 26: mod_base = OTHER; note = uracil
  source 1..28: mol_type = other DNA
gttatagatggtgaaacctgtttgttgg

SEQ ID NO: 117 - DNA, 26 bp, synthetic construct
  misc_feature 1..26: note = Synthetic DNA primer, R14
  modified_base 12: mod_base = OTHER; note = uracil
  modified_base 25: mod_base = OTHER; note = uracil
  source 1..26: mol_type = other DNA
gattactggtttccaacaggttcttg

SEQ ID NO: 118 - DNA, 24 bp, synthetic construct
  misc_feature 1..24: note = Synthetic DNA primer, R15
  modified_base 9: mod_base = OTHER; note = uracil
  modified_base 22: mod_base = OTHER; note = uracil
  source 1..24: mol_type = other DNA
tatggtcttggacatccaggatct

SEQ ID NO: 119 - DNA, 26 bp, synthetic construct
  misc_feature 1..26: note = Synthetic DNA primer, R16
  modified_base 12: mod_base = OTHER; note = uracil
  modified_base 22: mod_base = OTHER; note = uracil
  source 1..26: mol_type = other DNA
taggaaatgcatttcctttcttccca

SEQ ID NO: 120 - DNA, 22 bp, synthetic construct
  misc_feature 1..22: note = Synthetic DNA primer, R17
  modified_base 9: mod_base = OTHER; note = uracil
  modified_base 19: mod_base = OTHER; note = uracil
  source 1..22: mol_type = other DNA
cctgtggctgtcagtatttgga

SEQ ID NO: 121 - DNA, 21 bp, synthetic construct
  misc_feature 1..21: note = Synthetic DNA primer, R18
  modified_base 9: mod_base = OTHER; note = uracil
  modified_base 18: mod_base = OTHER; note = uracil
  source 1..21: mol_type = other DNA
gttcatcctgctggagctcat

SEQ ID NO: 122 - DNA, 29 bp, synthetic construct
  misc_feature 1..29: note = Synthetic DNA primer, R19
  modified_base 15: mod_base = OTHER; note = uracil
  modified_base 27: mod_base = OTHER; note = uracil
  source 1..29: mol_type = other DNA
gtagctgctgaaaatgtaactttgtatcc

SEQ ID NO: 123 - DNA, 22 bp, synthetic construct
  misc_feature 1..22: note = Synthetic DNA primer, R20
  modified_base 12: mod_base = OTHER; note = uracil
  modified_base 20: mod_base = OTHER; note = uracil
  source 1..22: mol_type = other DNA
actctgtaggctgcagttctca

SEQ ID NO: 124 - DNA, 23 bp, synthetic construct
  misc_feature 1..23: note = Synthetic DNA primer, R21
  modified_base 10: mod_base = OTHER; note = uracil
  modified_base 20: mod_base = OTHER; note = uracil
  source 1..23: mol_type = other DNA
ctcctcttgtcttctcctttgca

SEQ ID NO: 125 - DNA, 26 bp, synthetic construct
  misc_feature 1..26: note = Synthetic DNA primer, R22
  modified_base 13: mod_base = OTHER; note = uracil
  modified_base 24: mod_base = OTHER; note = uracil
  source 1..26: mol_type = other DNA
cttgtgagtggatgggtaaaacctat

SEQ ID NO: 126 - DNA, 29 bp, synthetic construct
  misc_feature 1..29: note = Synthetic DNA primer, R23
  modified_base 12: mod_base = OTHER; note = uracil
  modified_base 27: mod_base = OTHER; note = uracil
  source 1..29: mol_type = other DNA
cggactgaaagtataaccttcttctttcc

SEQ ID NO: 127 - DNA, 26 bp, synthetic construct
  misc_feature 1..26: note = Synthetic DNA primer, R24
  modified_base 12: mod_base = OTHER; note = uracil
  modified_base 24: mod_base = OTHER; note = uracil
  source 1..26: mol_type = other DNA
gcatgtgaacattctgcttttcatgg

SEQ ID NO: 128 - DNA, 22 bp, synthetic construct
  misc_feature 1..22: note = Synthetic DNA primer, R25
  modified_base 12: mod_base = OTHER; note = uracil
  modified_base 21: mod_base = OTHER; note = uracil
  source 1..22: mol_type = other DNA
acgccttcacctttaacacctc

SEQ ID NO: 129 - DNA, 22 bp, synthetic construct
  misc_feature 1..22: note = Synthetic DNA primer, R26
  modified_base 11: mod_base = OTHER; note = uracil
  modified_base 19: mod_base = OTHER; note = uracil
  source 1..22: mol_type = other DNA
acttgggaggtatccacatcct

SEQ ID NO: 130 - DNA, 28 bp, synthetic construct
  misc_feature 1..28: note = Synthetic DNA primer, R27
  modified_base 11: mod_base = OTHER; note = uracil
  modified_base 23: mod_base = OTHER; note = uracil
  source 1..28: mol_type = other DNA
agattcatcttgaagaagttgatggagg

SEQ ID NO: 131 - DNA, 33 bp, synthetic construct
  misc_feature 1..33: note = Synthetic DNA primer, R28
  modified_base 14: mod_base = OTHER; note = uracil
  modified_base 29: mod_base = OTHER; note = uracil
  source 1..33: mol_type = other DNA
gaataggatattgtatcataccaatttctcgat

SEQ ID NO: 132 - DNA, 30 bp, synthetic construct
  misc_feature 1..30: note = Synthetic DNA primer, R29
  modified_base 14: mod_base = OTHER; note = uracil
  modified_base 29: mod_base = OTHER; note = uracil
  source 1..30: mol_type = other DNA
cagcatttgactttaccttatcaatgtctc

SEQ ID NO: 133 - DNA, 33 bp, synthetic construct
  misc_feature 1..33: note = Synthetic DNA primer, R30
  modified_base 16: mod_base = OTHER; note = uracil
  modified_base 31: mod_base = OTHER; note = uracil
  source 1..33: mol_type = other DNA
actgctaaacactaatataacctttggaaatat

SEQ ID NO: 134 - DNA, 30 bp, synthetic construct
  misc_feature 1..30: note = Synthetic DNA primer, R31
  modified_base 16: mod_base = OTHER; note = uracil
  modified_base 29: mod_base = OTHER; note = uracil
  source 1..30: mol_type = other DNA
catttttccagatactagagtgtctgtgta

SEQ ID NO: 135 - DNA, 29 bp, synthetic construct
  misc_feature 1..29: note = Synthetic DNA primer, R32
  modified_base 15: mod_base = OTHER; note = uracil
  modified_base 26: mod_base = OTHER; note = uracil
  source 1..29: mol_type = other DNA
cataagagagaaggtttgactgccataaa

SEQ ID NO: 136 - DNA, 28 bp, synthetic construct
  misc_feature 1..28: note = Synthetic DNA primer, R33
  modified_base 13: mod_base = OTHER; note = uracil
  modified_base 26: mod_base = OTHER; note = uracil
  source 1..28: mol_type = other DNA
gaatctccattttagcacttacctgtga

SEQ ID NO: 137 - DNA, 32 bp, synthetic construct
  misc_feature 1..32: note = Synthetic DNA primer, R34
  modified_base 12: mod_base = OTHER; note = uracil
  modified_base 28: mod_base = OTHER; note = uracil
  source 1..32: mol_type = other DNA
agaatgtcagttaagttaatgagcttttccat

SEQ ID NO: 138 - DNA, 25 bp, synthetic construct
  misc_feature 1..25: note = Synthetic DNA primer, R35
  modified_base 8: mod_base = OTHER; note = uracil
  modified_base 24: mod_base = OTHER; note = uracil
  source 1..25: mol_type = other DNA
gcttgattccaaggaccatgatctg

SEQ ID NO: 139 - DNA, 27 bp, synthetic construct
  misc_feature 1..27: note = Synthetic DNA primer, R36
  modified_base 13: mod_base = OTHER; note = uracil
  modified_base 23: mod_base = OTHER; note = uracil
  source 1..27: mol_type = other DNA
caattcccaaaatgaaggtagctacac

SEQ ID NO: 140 - DNA, 27 bp, synthetic construct
  misc_feature 1..27: note = Synthetic DNA primer, R37
  modified_base 12: mod_base = OTHER; note = uracil
  modified_base 25: mod_base = OTHER; note = uracil
  source 1..27: mol_type = other DNA
ggaagatccaatccatttttgttgtcc

SEQ ID NO: 141 - DNA, 19 bp, synthetic construct
  misc_feature 1..19: note = Synthetic DNA primer, R38
  modified_base 15: mod_base = OTHER; note = uracil
  modified_base 18: mod_base = OTHER; note = uracil
  source 1..19: mol_type = other DNA
cgggaagcgggagatcttg

SEQ ID NO: 142 - DNA, 18 bp, synthetic construct
  misc_feature 1..18: note = Synthetic DNA primer, R39
  modified_base 8: mod_base = OTHER; note = uracil
  modified_base 16: mod_base = OTHER; note = uracil
  source 1..18: mol_type = other DNA
ggcgtcctactggcatga

SEQ ID NO: 143 - DNA, 21 bp, synthetic construct
  misc_feature 1..21: note = Synthetic DNA primer, R40
  modified_base 4: mod_base = OTHER; note = uracil
  modified_base 13: mod_base = OTHER; note = uracil
  source 1..21: mol_type = other DNA
ccttcagcagcttgaagagct

SEQ ID NO: 144 - DNA, 26 bp, synthetic construct
  misc_feature 1..26: note = Synthetic DNA primer, R41
  modified_base 12: mod_base = OTHER; note = uracil
  modified_base 22: mod_base = OTHER; note = uracil
  source 1..26: mol_type = other DNA
ggaaactcccatcttgagtcataagg

SEQ ID NO: 145 - DNA, 25 bp, synthetic construct
  misc_feature 1..25: note = Synthetic DNA primer, R42
  modified_base 12: mod_base = OTHER; note = uracil
  modified_base 21: mod_base = OTHER; note = uracil
  source 1..25: mol_type = other DNA
catgtgtccagtgaaaatcctcact

SEQ ID NO: 146 - DNA, 30 bp, synthetic construct
  misc_feature 1..30: note = Synthetic DNA primer, R43
  modified_base 7: mod_base = OTHER; note = uracil
  modified_base 20: mod_base = OTHER; note = uracil
  source 1..30: mol_type = other DNA
ctgactttagagattaaagtgaaggaggat

SEQ ID NO: 147 - DNA, 28 bp, synthetic construct
  misc_feature 1..28: note = Synthetic DNA primer, R44
  modified_base 13: mod_base = OTHER; note = uracil
  modified_base 26: mod_base = OTHER; note = uracil
  source 1..28: mol_type = other DNA
cctggacaaaaataccaatctattgtgg

SEQ ID NO: 148 - DNA, 28 bp, synthetic construct
  misc_feature 1..28: note = Synthetic DNA primer, R45
  modified_base 11: mod_base = OTHER; note = uracil
  modified_base 22: mod_base = OTHER; note = uracil
  source 1..28: mol_type = other DNA
actgatatggtagacagagcctaaacat

SEQ ID NO: 149 - DNA, 22 bp, synthetic construct
  misc_feature 1..22: note = Synthetic DNA primer, R46
  modified_base 13: mod_base = OTHER; note = uracil
  modified_base 21: mod_base = OTHER; note = uracil
  source 1..22: mol_type = other DNA
actgaccaaaactcagcctgtt

SEQ ID NO: 150 - DNA, 25 bp, synthetic construct
  misc_feature 1..25: note = Synthetic DNA primer, R47
  modified_base 13: mod_base = OTHER; note = uracil
  modified_base 24: mod_base = OTHER; note = uracil
  source 1..25: mol_type = other DNA
cctgacagacaataaaaggcagctt

SEQ ID NO: 151 - DNA, 28 bp, synthetic construct
  misc_feature 1..28: note = Synthetic DNA primer, R48
  modified_base 9: mod_base = OTHER; note = uracil
  modified_base 20: mod_base = OTHER; note = uracil
  source 1..28: mol_type = other DNA
gttgaaactaaaaatcctttgcaggact

SEQ ID NO: 152 - DNA, 24 bp, synthetic construct
  misc_feature 1..24: note = Synthetic DNA primer, R49
  modified_base 16: mod_base = OTHER; note = uracil
  modified_base 23: mod_base = OTHER; note = uracil
  source 1..24: mol_type = other DNA
acattctgaagcagcttggagttt

SEQ ID NO: 153 - DNA, 26 bp, synthetic construct
  misc_feature 1..26: note = Synthetic DNA primer, R50
  modified_base 15: mod_base = OTHER; note = uracil
  modified_base 25: mod_base = OTHER; note = uracil
  source 1..26: mol_type = other DNA
gaggagattgaaaatcttcctgcctt

SEQ ID NO: 154 - DNA, 20 bp, synthetic construct
  misc_feature 1..20: note = Synthetic DNA primer, R51
  modified_base 9: mod_base = OTHER; note = uracil
  modified_base 14: mod_base = OTHER; note = uracil
  source 1..20: mol_type = other DNA
ttggtccgtctcctccacgg

SEQ ID NO: 155 - DNA, 28 bp, synthetic construct
  misc_feature 1..28: note = Synthetic DNA primer, R52
  modified_base 12: mod_base = OTHER; note = uracil
  modified_base 26: mod_base = OTHER; note = uracil
  source 1..28: mol_type = other DNA
cttcagtccggttttatttgcatcatag

SEQ ID NO: 156 - DNA, 24 bp, synthetic construct
  misc_feature 1..24: note = Synthetic DNA primer, R53
  modified_base 13: mod_base = OTHER; note = uracil
  modified_base 21: mod_base = OTHER; note = uracil
  source 1..24: mol_type = other DNA
gactctccaagatgggatactcca

SEQ ID NO: 157 - DNA, 22 bp, synthetic construct
  misc_feature 1..22: note = Synthetic DNA primer, R54
  modified_base 9: mod_base = OTHER; note = uracil
  modified_base 21: mod_base = OTHER; note = uracil
  source 1..22: mol_type = other DNA
cggtgacttactgcagctgttt

SEQ ID NO: 158 - DNA, 22 bp, synthetic construct
  misc_feature 1..22: note = Synthetic DNA primer, R55
  modified_base 13: mod_base = OTHER; note = uracil
  modified_base 21: mod_base = OTHER; note = uracil
  source 1..22: mol_type = other DNA
tccagaccagggtgttgttttc

SEQ ID NO: 159 - DNA, 23 bp, synthetic construct
  misc_feature 1..23: note = Synthetic DNA primer, R56
  modified_base 14: mod_base = OTHER; note = uracil
  modified_base 22: mod_base = OTHER; note = uracil
  source 1..23: mol_type = other DNA
tgtgccagggaccttaccttata

SEQ ID NO: 160 - RNA, 24 nt, synthetic construct
  misc_feature 1..24: note = Synthetic Primer, R57
  source 1..24: mol_type = other RNA
cacagcaaagcagaaactcacatc

SEQ ID NO: 161 - DNA, 21 bp, synthetic construct
  misc_feature 1..21: note = Synthetic DNA primer, R58
  modified_base 6: mod_base = OTHER; note = uracil
  modified_base 18: mod_base = OTHER; note = uracil
  source 1..21: mol_type = other DNA
tgtgttcccggacatagtcca

SEQ ID NO: 162 - DNA, 23 bp, synthetic construct
  misc_feature 1..23: note = Synthetic DNA primer, R59
  modified_base 9: mod_base = OTHER; note = uracil
  modified_base 18: mod_base = OTHER; note = uracil
  source 1..23: mol_type = other DNA
gaaaatgctggctgacctaaagc

SEQ ID NO: 163 - DNA, 30 bp, synthetic construct
  misc_feature 1..30: note = Synthetic DNA primer, R60
  modified_base 11: mod_base = OTHER; note = uracil
  modified_base 28: mod_base = OTHER; note = uracil
  source 1..30: mol_type = other DNA
cacaacccactgaggtatatgtataggtat

SEQ ID NO: 164 - DNA, 30 bp, synthetic construct
  misc_feature 1..30: note = Synthetic DNA primer, R61
  modified_base 17: mod_base = OTHER; note = uracil
  modified_base 29: mod_base = OTHER; note = uracil
  source 1..30: mol_type = other DNA
ccatggttaaataaaatgccacttactgtt

SEQ ID NO: 165 - DNA, 26 bp, synthetic construct
  misc_feature 1..26: note = Synthetic DNA primer, R62
  modified_base 9: mod_base = OTHER; note = uracil
  modified_base 23: mod_base = OTHER; note = uracil
  source 1..26: mol_type = other DNA
cttggtggtaaacttttgagtttgca

SEQ ID NO: 166 - DNA, 19 bp, synthetic construct
  misc_feature 1..19: note = Synthetic DNA primer, R63
  modified_base 8: mod_base = OTHER; note = uracil
  modified_base 14: mod_base = OTHER; note = uracil
  source 1..19: mol_type = other DNA
ccaagcctcatggtgccat

SEQ ID NO: 167 - DNA, 20 bp, synthetic construct
  misc_feature 1..20: note = Synthetic DNA primer, R64
  modified_base 4: mod_base = OTHER; note = uracil
  modified_base 14: mod_base = OTHER; note = uracil
  source 1..20: mol_type = other DNA
tactggcagcaagtgcccag

SEQ ID NO: 168 - DNA, 22 bp, synthetic construct
  misc_feature 1..22: note = Synthetic DNA primer, R65
  modified_base 8: mod_base = OTHER; note = uracil
  modified_base 21: mod_base = OTHER; note = uracil
  source 1..22: mol_type = other DNA
ccctcactcacagcacatagtc

SEQ ID NO: 169 - DNA, 20 bp, synthetic construct
  misc_feature 1..20: note = Synthetic DNA primer, R66
  modified_base 6: mod_base = OTHER; note = uracil
  modified_base 18: mod_base = OTHER; note = uracil
  source 1..20: mol_type = other DNA
ccaggtacgcctccagatga

SEQ ID NO: 170 - DNA, 30 bp, synthetic construct
  misc_feature 1..30: note = Synthetic DNA primer, R67
  modified_base 14: mod_base = OTHER; note = uracil
  modified_base 26: mod_base = OTHER; note = uracil
  source 1..30: mol_type = other DNA
cttcatgaagacctcacagtaaaaataggt

SEQ ID NO: 171 - DNA, 25 bp, synthetic construct
  misc_feature 1..25: note = Synthetic DNA primer, R68
  modified_base 12: mod_base = OTHER; note = uracil
  modified_base 24: mod_base = OTHER; note = uracil
  source 1..25: mol_type = other DNA
gactcgagtgatgattgggagattc

SEQ ID NO: 172 - DNA, 27 bp, synthetic construct
  misc_feature 1..27: note = Synthetic DNA primer, R69
  modified_base 9: mod_base = OTHER; note = uracil
  modified_base 21: mod_base = OTHER; note = uracil
  source 1..27: mol_type = other DNA
agatgctctgagaaaggcattagaaag

SEQ ID NO: 173 - DNA, 26 bp, synthetic construct
  misc_feature 1..26: note = Synthetic DNA primer, R70
  modified_base 12: mod_base = OTHER; note = uracil
  modified_base 23: mod_base = OTHER; note = uracil
  source 1..26: mol_type = other DNA
tattgttaaccttgcagaatggtcga

SEQ ID NO: 174 - DNA, 22 bp, synthetic construct
  misc_feature 1..22: note = Synthetic DNA primer, R71
  modified_base 2: mod_base = OTHER; note = uracil
  modified_base 10: mod_base = OTHER; note = uracil
  source 1..22: mol_type = other DNA
ctacctgcctacgcaacaagat

SEQ ID NO: 175 - DNA, 21 bp, synthetic construct
  misc_feature 1..21: note = Synthetic DNA primer, R72
  modified_base 7: mod_base = OTHER; note = uracil
  modified_base 20: mod_base = OTHER; note = uracil
  source 1..21: mol_type = other DNA
gggacctcagatgtgctgttg

SEQ ID NO: 176 - DNA, 20 bp, synthetic construct
  misc_feature 1..20: note = Synthetic DNA primer, R73
  modified_base 9: mod_base = OTHER; note = uracil
  modified_base 19: mod_base = OTHER; note = uracil
  source 1..20: mol_type = other DNA
gtggcttgtgggcaaacttg

SEQ ID NO: 177 - DNA, 22 bp, synthetic construct
  misc_feature 1..22: note = Synthetic DNA primer, R74
  modified_base 7: mod_base = OTHER; note = uracil
  modified_base 21: mod_base = OTHER; note = uracil
  source 1..22: mol_type = other DNA
cctgcttcaggacgttgaactc

SEQ ID NO: 178 - DNA, 20 bp, synthetic construct
  misc_feature 1..20: note = Synthetic DNA primer, R75
  modified_base 8: mod_base = OTHER; note = uracil
  modified_base 19: mod_base = OTHER; note = uracil
  source 1..20: mol_type = other DNA
acctggctcctcttcacgta

SEQ ID NO: 179 - DNA, 24 bp, synthetic construct
  misc_feature 1..24: note = Synthetic DNA primer, R76
  modified_base 10: mod_base = OTHER; note = uracil
  modified_base 23: mod_base = OTHER; note = uracil
  source 1..24: mol_type = other DNA
cacccacacttacacatcactttg

SEQ ID NO: 180 - DNA, 26 bp, synthetic construct
  misc_feature 1..26: note = Synthetic DNA primer, R77
  modified_base 9: mod_base = OTHER; note = uracil
  modified_base 25: mod_base = OTHER; note = uracil
  source 1..26: mol_type = other DNA
tcgagatttagcagccagaaatgttt

SEQ ID NO: 181 - DNA, 24 bp, synthetic construct
  misc_feature 1..24: note = Synthetic DNA primer, R78
  modified_base 9: mod_base = OTHER; note = uracil
  modified_base 18: mod_base = OTHER; note = uracil
  source 1..24: mol_type = other DNA
tgatctggtgtcagagatggagat

SEQ ID NO: 182 - DNA, 26 bp, synthetic construct
  misc_feature 1..26: note = Synthetic DNA primer, R79
  modified_base 2: mod_base = OTHER; note = uracil
  modified_base 9: mod_base = OTHER; note = uracil
  source 1..26: mol_type = other DNA
ctagcgcctggaagagaaaaggagat

SEQ ID NO: 183 - DNA, 22 bp, synthetic construct
  misc_feature 1..22: note = Synthetic DNA primer, R80
  modified_base 11: mod_base = OTHER; note = uracil
  modified_base 20: mod_base = OTHER; note = uracil
  source 1..22: mol_type = other DNA
ccctccacaatcattcctgtgt

SEQ ID NO: 184 - DNA, 30 bp, synthetic construct
  misc_feature 1..30: note = Synthetic DNA primer, R81
  modified_base 15: mod_base = OTHER; note = uracil
  modified_base 28: mod_base = OTHER; note = uracil
  source 1..30: mol_type = other DNA
cttatttattggtctctcattctcccatcc

SEQ ID NO: 185 - DNA, 22 bp, synthetic construct
  misc_feature 1..22: note = Synthetic DNA primer, R82
  modified_base 7: mod_base = OTHER; note = uracil
  modified_base 20: mod_base = OTHER; note = uracil
  source 1..22: mol_type = other DNA
gcctgttggacatcctggatac

SEQ ID NO: 186 - DNA, 23 bp, synthetic construct
  misc_feature 1..23: note = Synthetic DNA primer, R83
  modified_base 9: mod_base = OTHER; note = uracil
  modified_base 19: mod_base = OTHER; note = uracil
  source 1..23: mol_type = other DNA
aggagcgatgacggaatataagc

SEQ ID NO: 187 - DNA, 29 bp, synthetic construct
  misc_feature 1..29: note = Synthetic DNA primer, R84
  modified_base 13: mod_base = OTHER; note = uracil
  modified_base 27: mod_base = OTHER; note = uracil
  source 1..29: mol_type = other DNA
agttaaggactctgaagatgtacctatgg

SEQ ID NO: 188 - DNA, 28 bp, synthetic construct
  misc_feature 1..28: note = Synthetic DNA primer, R85
  modified_base 15: mod_base = OTHER; note = uracil
  modified_base 27: mod_base = OTHER; note = uracil
  source 1..28: mol_type = other DNA
gtaataatccagactgtgtttctccctt

SEQ ID NO: 189 - DNA, 30 bp, synthetic construct
  misc_feature 1..30: note = Synthetic DNA primer, R86
  modified_base 13: mod_base = OTHER; note = uracil
  modified_base 26: mod_base = OTHER; note = uracil
  source 1..30: mol_type = other DNA
tattataaggcctgctgaaaatgactgaat

SEQ ID NO: 190 - DNA, 25 bp, synthetic construct
  misc_feature 1..25: note = Synthetic DNA primer, R87
  modified_base 4: mod_base = OTHER; note = uracil
  modified_base 19: mod_base = OTHER; note = uracil
  source 1..25: mol_type = other DNA
gaataaagaggagcaggttgaggaa

SEQ ID NO: 191 - DNA, 25 bp, synthetic construct
  misc_feature 1..25: note = Synthetic DNA primer, R88
  modified_base 15: mod_base = OTHER; note = uracil
  modified_base 24: mod_base = OTHER; note = uracil
  source 1..25: mol_type = other DNA
caacatgacgaagatggcaaacttc

SEQ ID NO: 192 - DNA, 24 bp, synthetic construct
  misc_feature 1..24: note = Synthetic DNA primer, R89
  modified_base 8: mod_base = OTHER; note = uracil
  modified_base 22: mod_base = OTHER; note = uracil
  source 1..24: mol_type = other DNA
gggtacatacaaagcagtctgtgt

SEQ ID NO: 193 - DNA, 29 bp, synthetic construct
  misc_feature 1..29: note = Synthetic DNA primer, R90
  modified_base 14: mod_base = OTHER; note = uracil
  modified_base 27: mod_base = OTHER; note = uracil
  source 1..29: mol_type = other DNA
gcccatttttatctacttccatcttgtca

SEQ ID NO: 194 - DNA, 26 bp, synthetic construct
  misc_feature 1..26: note = Synthetic DNA primer, R91
  modified_base 11: mod_base = OTHER; note = uracil
  modified_base 25: mod_base = OTHER; note = uracil
  source 1..26: mol_type = other DNA
agttcacaaatccatcaatgttgctc

SEQ ID NO: 195 - DNA, 24 bp, synthetic construct
  misc_feature 1..24: note = Synthetic DNA primer, R92
  modified_base 9: mod_base = OTHER; note = uracil
  modified_base 21: mod_base = OTHER; note = uracil
  source 1..24: mol_type = other DNA
tgtgattgtagggtctcccttgat

SEQ ID NO: 196 - DNA, 20 bp, synthetic construct
  misc_feature 1..20: note = Synthetic DNA primer, R93
  modified_base 6: mod_base = OTHER; note = uracil
  modified_base 18: mod_base = OTHER; note = uracil
  source 1..20: mol_type = other DNA
gggtctgacgggtagagtgt

SEQ ID NO: 197 - DNA, 25 bp, synthetic construct
  misc_feature 1..25: note = Synthetic DNA primer, R94
  modified_base 13: mod_base = OTHER; note = uracil
  modified_base 24: mod_base = OTHER; note = uracil
  source 1..25: mol_type = other DNA
tcaaagtcgtcatccttcagttctc

SEQ ID NO: 198 - DNA, 22 bp, synthetic construct
  misc_feature 1..22: note = Synthetic DNA primer, R95
  modified_base 9: mod_base = OTHER; note = uracil
  modified_base 21: mod_base = OTHER; note = uracil
  source 1..22: mol_type = other DNA
catcgctgtagaacgcaccata

SEQ ID NO: 199 - DNA, 28 bp, synthetic construct
  misc_feature 1..28: note = Synthetic DNA primer, R96
  modified_base 13: mod_base = OTHER; note = uracil
  modified_base 26: mod_base = OTHER; note = uracil
  source 1..28: mol_type = other DNA
ggaaacttctgttcataccgacatgtag

SEQ ID NO: 200 - DNA, 26 bp, synthetic construct
  misc_feature 1..26: note = Synthetic DNA primer, F97
  modified_base 11: mod_base = OTHER; note = uracil
  modified_base 23: mod_base = OTHER; note = uracil
  source 1..26: mol_type = other DNA
gaggtcgtattcgtccacaaaatggt

SEQ ID NO: 201 - DNA, 30 bp, synthetic construct
  misc_feature 1..30: note = Synthetic DNA primer, F98
  modified_base 13: mod_base = OTHER; note = uracil
  modified_base 29: mod_base = OTHER; note = uracil
  source 1..30: mol_type = other DNA
gaaactgcttagtaactagcagaagtgttc

SEQ ID NO: 202 - DNA, 28 bp, synthetic construct
  misc_feature 1..28: note = Synthetic DNA primer, F99
  modified_base 11: mod_base = OTHER; note = uracil
  modified_base 22: mod_base = OTHER; note = uracil
  source 1..28: mol_type = other DNA
gacaaagttgtgtgttgtaagtggaaca

SEQ ID NO: 203 - DNA, 27 bp, synthetic construct
  misc_feature 1..27: note = Synthetic DNA primer, F100
  modified_base 12: mod_base = OTHER; note = uracil
  modified_base 26: mod_base = OTHER; note = uracil
  source 1..27: mol_type = other DNA
gagcaccaatctttcttctgccttttg

SEQ ID NO: 204 - RNA, 25 nt, synthetic construct
  misc_feature 1..25: note = Synthetic Primer, F101
  source 1..25: mol_type = other RNA
gagggatcccaaggaagagaagtga

SEQ ID NO: 205 - DNA, 27 bp, synthetic construct
  misc_feature 1..27: note = Synthetic DNA primer, F102
  modified_base 13: mod_base = OTHER; note = uracil
  modified_base 26: mod_base = OTHER; note = uracil
  source 1..27: mol_type = other DNA
gagctactctcctgaactctctcactc

SEQ ID NO: 206 - DNA, 23 bp, synthetic construct
  misc_feature 1..23: note = Synthetic DNA primer, F103
  modified_base 10: mod_base = OTHER; note = uracil
  modified_base 19: mod_base = OTHER; note = uracil
  source 1..23: mol_type = other DNA
gactcccagttgcaacgttaggt

SEQ ID NO: 207 - DNA, 20 bp, synthetic construct
  misc_feature 1..20: note = Synthetic DNA primer, F104
  modified_base 8: mod_base = OTHER; note = uracil
  modified_base 17: mod_base = OTHER; note = uracil
  source 1..20: mol_type = other DNA
gatcacgtgtcccccttcca

SEQ ID NO: 208 - DNA, 30 bp, synthetic construct
  misc_feature 1..30: note = Synthetic DNA primer, F105
  modified_base 12: mod_base = OTHER; note = uracil
  modified_base 21: mod_base = OTHER; note = uracil
  source 1..30: mol_type = other DNA
gaacatttggctgtgacttctaagaagaaa

SEQ ID NO: 209 - DNA, 25 bp, synthetic construct
  misc_feature 1..25: note = Synthetic DNA primer, F106
  modified_base 8: mod_base = OTHER; note = uracil
  modified_base 17: mod_base = OTHER; note = uracil
  source 1..25: mol_type = other DNA
gagatgatccagatgttagggcagt

SEQ ID NO: 210 - DNA, 28 bp, synthetic construct
  misc_feature 1..28: note = Synthetic DNA primer, F107
  modified_base 11: mod_base = OTHER; note = uracil
  modified_base 26: mod_base = OTHER; note = uracil
  source 1..28: mol_type = other DNA
gagcccaaattgatttcgatgatcttca

SEQ ID NO: 211 - DNA, 23 bp, synthetic construct
  misc_feature 1..23: note = Synthetic DNA primer, F108
  modified_base 12: mod_base = OTHER; note = uracil
  modified_base 21: mod_base = OTHER; note = uracil
  source 1..23: mol_type = other DNA
gagctcaagagtgagccacttct

SEQ ID NO: 212 - DNA, 29 bp, synthetic construct
  misc_feature 1..29: note = Synthetic DNA primer, F109
  modified_base 14: mod_base = OTHER; note = uracil
  modified_base 27: mod_base = OTHER; note = uracil
  source 1..29: mol_type = other DNA
gaattaacacacatcagtggaacttctgt

SEQ ID NO: 213 - RNA, 27 nt, synthetic construct
  misc_feature 1..27: note = Synthetic Primer, F110
  source 1..27: mol_type = other RNA
gagcaatccaaaagaatagcagccaaa

SEQ ID NO: 214 - DNA, 28 bp, synthetic construct
  misc_feature 1..28: note = Synthetic DNA primer, F111
  modified_base 13: mod_base = OTHER; note = uracil
  modified_base 27: mod_base = OTHER; note = uracil
  source 1..28: mol_type = other DNA
gactttgtggaatagcccatgaagagta

SEQ ID NO: 215 - DNA, 25 bp, synthetic construct
  misc_feature 1..25: note = Synthetic DNA primer, F112
  modified_base 18: mod_base = OTHER; note = uracil
  modified_base 24: mod_base = OTHER; note = uracil
  source 1..25: mol_type = other DNA
gaacaggaagagcacagtcactttg

SEQ ID NO: 216 - DNA, 26 bp, synthetic construct
  misc_feature 1..26: note = Synthetic DNA primer, F113
  modified_base 13: mod_base = OTHER; note = uracil
  modified_base 23: mod_base = OTHER; note = uracil
  source 1..26: mol_type = other DNA
gaccatgcagagtgaaaggatatccc

SEQ ID NO: 217 - DNA, 20 bp, synthetic construct
  misc_feature 1..20: note = Synthetic DNA primer, F114
  modified_base 12: mod_base = OTHER; note = uracil
  modified_base 19: mod_base = OTHER; note = uracil
  source 1..20: mol_type = other DNA
gatggagccgctgacaccta

SEQ ID NO: 218 - DNA, 23 bp, synthetic construct
  misc_feature 1..23: note = Synthetic DNA primer, F115
  modified_base 7: mod_base = OTHER; note = uracil
  modified_base 16: mod_base = OTHER; note = uracil
  source 1..23: mol_type = other DNA
gaggtgtctagcccatgggagaa

SEQ ID NO: 219 - DNA, 23 bp, synthetic construct
  misc_feature 1..23: note = Synthetic DNA primer, F116
  modified_base 9: mod_base = OTHER; note = uracil
  modified_base 21: mod_base = OTHER; note = uracil
  source 1..23: mol_type = other DNA
gagtctggtccacattgctctca

SEQ ID NO: 220 - DNA, 27 bp, synthetic construct
  misc_feature 1..27: note = Synthetic DNA primer, F117
  modified_base 10: mod_base = OTHER; note = uracil
  modified_base 25: mod_base = OTHER; note = uracil
  source 1..27: mol_type = other DNA
gagcaagagtacacactcctcatttgg

SEQ ID NO: 221 - DNA, 24 bp, synthetic construct
  misc_feature 1..24: note = Synthetic DNA primer, F118
  modified_base 11: mod_base = OTHER; note = uracil
  modified_base 23: mod_base = OTHER; note = uracil
  source 1..24: mol_type = other DNA
gactggtttctggtgggaccatta

SEQ ID NO: 222 - DNA, 25 bp, synthetic construct
  misc_feature 1..25: note = Synthetic DNA primer, F119
  modified_base 14: mod_base = OTHER; note = uracil
  modified_base 24: mod_base = OTHER; note = uracil
  source 1..25: mol_type = other DNA
gactcccaggcacttgatgatactc

SEQ ID NO: 223 - DNA, 21 bp, synthetic construct
  misc_feature 1..21: note = Synthetic DNA primer, F120
  modified_base 8: mod_base = OTHER; note = uracil
  modified_base 19: mod_base = OTHER; note = uracil
  source 1..21: mol_type = other DNA
gagggcttggtaacgtcctgt

SEQ ID NO: 224 - DNA, 27 bp, synthetic construct
  misc_feature 1..27: note = Synthetic DNA primer, F121
  modified_base 15: mod_base = OTHER; note = uracil
  modified_base 24: mod_base = OTHER; note = uracil
  source 1..27: mol_type = other DNA
gatgtgtcaaggagttcgaagattcac

SEQ ID NO: 225 - DNA, 21 bp, synthetic construct
  misc_feature 1..21: note = Synthetic DNA primer, F122
  modified_base 4: mod_base = OTHER; note = uracil
  modified_base 17: mod_base = OTHER; note = uracil
  source 1..21: mol_type = other DNA
gagtacagccagtgtgtccga

SEQ ID NO: 226 - DNA, 24 bp, synthetic construct
  misc_feature 1..24: note = Synthetic DNA primer, F123
  modified_base 13: mod_base = OTHER; note = uracil
  modified_base 23: mod_base = OTHER; note = uracil
  source 1..24: mol_type = other DNA
gaccatccgggctttacgcaaata

SEQ ID NO: 227 - DNA, 26 bp, synthetic construct
  misc_feature 1..26: note = Synthetic DNA primer, F124
  modified_base 9: mod_base = OTHER; note = uracil
  modified_base 25: mod_base = OTHER; note = uracil
  source 1..26: mol_type = other DNA
gaccccactgaacctctcttacattt

SEQ ID NO: 228 - DNA, 23 bp, synthetic construct
  misc_feature 1..23: note = Synthetic DNA primer, F125
  modified_base 6: mod_base = OTHER; note = uracil
  modified_base 22: mod_base = OTHER; note = uracil
  source 1..23: mol_type = other DNA
gaccctaacagccatgctttctc

SEQ ID NO: 229 - DNA, 23 bp, synthetic construct
  misc_feature 1..23: note = Synthetic DNA primer, F126
  modified_base 9: mod_base = OTHER; note = uracil
  modified_base 22: mod_base = OTHER; note = uracil
  source 1..23: mol_type = other DNA
gacggcgatgctgagaaccaata

SEQ ID NO: 230 - DNA, 19 bp, synthetic construct
  misc_feature 1..19: note = Synthetic DNA primer, F127
  modified_base 9: mod_base = OTHER; note = uracil
  modified_base 18: mod_base = OTHER; note = uracil
  source 1..19: mol_type = other DNA
gaccgacgttgaccgcatc

SEQ ID NO: 231 - DNA, 30 bp, synthetic construct
  misc_feature 1..30: note = Synthetic DNA primer, F128
  modified_base 10: mod_base = OTHER; note = uracil
  modified_base 21: mod_base = OTHER; note = uracil
  source 1..30: mol_type = other DNA
gaaaatatttcagtgtccgttcacacacaa

SEQ ID NO: 232 - DNA, 21 bp, synthetic construct
  misc_feature 1..21: note = Synthetic DNA primer, F129
  modified_base 9: mod_base = OTHER; note = uracil
  modified_base 20: mod_base = OTHER; note = uracil
  source 1..21: mol_type = other DNA
gaccacactgacgtgcctctc

SEQ ID NO: 233 - DNA, 23 bp, synthetic construct
  misc_feature 1..23: note = Synthetic DNA primer, F130
  modified_base 17: mod_base = OTHER; note = uracil
  modified_base 21: mod_base = OTHER; note = uracil
  source 1..23: mol_type = other DNA
gagcgccacagagaagttgttga

SEQ ID NO: 234 - DNA, 27 bp, synthetic construct
  misc_feature 1..27: note = Synthetic DNA primer, F131
  modified_base 11: mod_base = OTHER; note = uracil
  modified_base 25: mod_base = OTHER; note = uracil
  source 1..27: mol_type = other DNA
gaccacaaaatggatccagacaactgt

SEQ ID NO: 235 - DNA, 33 bp, synthetic construct
  misc_feature 1..33: note = Synthetic DNA primer, F132
  modified_base 14: mod_base = OTHER; note = uracil
  modified_base 30: mod_base = OTHER; note = uracil
  source 1..33: mol_type = other DNA
gaactgtttcgtatttatagctgatttgatgga

SEQ ID NO: 236 - DNA, 23 bp, synthetic construct
  misc_feature 1..23: note = Synthetic DNA primer, F133
  modified_base 8: mod_base = OTHER; note = uracil
  modified_base 14: mod_base = OTHER; note = uracil
  source 1..23: mol_type = other DNA
gacctcattgccctcaacacagt

SEQ ID NO: 237 - DNA, 23 bp, synthetic construct
  misc_feature 1..23: note = Synthetic DNA primer, F134
  modified_base 10: mod_base = OTHER; note = uracil
  modified_base 21: mod_base = OTHER; note = uracil
  source 1..23: mol_type = other DNA
gacaccacgtaccagatggatgt

SEQ ID NO: 238 - DNA, 28 bp, synthetic construct
  misc_feature 1..28: note = Synthetic DNA primer, F135
  modified_base 12: mod_base = OTHER; note = uracil
  modified_base 24: mod_base = OTHER; note = uracil
  source 1..28: mol_type = other DNA
gaagacatgcatgaacatttttctccac

SEQ ID NO: 239 - DNA, 22 bp, synthetic construct
  misc_feature 1..22: note = Synthetic DNA primer, F136
  modified_base 5: mod_base = OTHER; note = uracil
  modified_base 15: mod_base = OTHER; note = uracil
  source 1..22: mol_type = other DNA
gatgtggagcctcttacaccca

SEQ ID NO: 240 - DNA, 25 bp, synthetic construct
  misc_feature 1..25: note = Synthetic DNA primer, F137
  modified_base 12: mod_base = OTHER; note = uracil
  modified_base 23: mod_base = OTHER; note = uracil
  source 1..25: mol_type = other DNA
gaacgtcttccttctctctctgtca

SEQ ID NO: 241 - DNA, 27 bp, synthetic construct
  misc_feature 1..27: note = Synthetic DNA primer, F138
  modified_base 14: mod_base = OTHER; note = uracil
  modified_base 26: mod_base = OTHER; note = uracil
  source 1..27: mol_type = other DNA
gagaatgtgaaaattccagtggccatc

SEQ ID NO: 242 - DNA, 22 bp, synthetic construct
  misc_feature 1..22: note = Synthetic DNA primer, F139
  modified_base 10: mod_base = OTHER; note = uracil
  modified_base 20: mod_base = OTHER; note = uracil
  source 1..22: mol_type = other DNA
gagggtgtgtggtctcccatac

SEQ ID NO: 243 - DNA, 24 bp, synthetic construct
  misc_feature 1..24: note = Synthetic DNA primer, F140
  modified_base 11: mod_base = OTHER; note = uracil
  modified_base 22: mod_base = OTHER; note = uracil
  source 1..24: mol_type = other DNA
gaggatgagctacctggaggatgt

SEQ ID NO: 244 - DNA, 27 bp, synthetic construct
  misc_feature 1..27: note = Synthetic DNA primer, F141
  modified_base 11: mod_base = OTHER; note = uracil
  modified_base 24: mod_base = OTHER; note = uracil
  source 1..27: mol_type = other DNA
gaggtcactgtacaccttacacatgaa

SEQ ID NO: 245 - DNA, 28 bp, synthetic construct
  misc_feature 1..28: note = Synthetic DNA primer, F142
  modified_base 9: mod_base = OTHER; note = uracil
  modified_base 18: mod_base = OTHER; note = uracil
  source 1..28: mol_type = other DNA
gacatcactgtaaaccttgcagacaaac

SEQ ID NO: 246 - DNA, 25 bp, synthetic construct
  misc_feature 1..25: note = Synthetic DNA primer, F143
  modified_base 12: mod_base = OTHER; note = uracil
  modified_base 24: mod_base = OTHER; note = uracil
  source 1..25: mol_type = other DNA
gagcttcttggtcgtgttcttcatt

SEQ ID NO: 247 - DNA, 24 bp, synthetic construct
  misc_feature 1..24: note = Synthetic DNA primer, F144
  modified_base 3: mod_base = OTHER; note = uracil
  modified_base 19: mod_base = OTHER; note = uracil
  source 1..24: mol_type = other DNA
gatggaagcccagccatttctaaa

SEQ ID NO: 248 - DNA, 19 bp, synthetic construct
  misc_feature 1..19: note = Synthetic DNA primer, F145
  modified_base 8: mod_base = OTHER; note = uracil
  modified_base 17: mod_base = OTHER; note = uracil
  source 1..19: mol_type = other DNA
gagcccctgagcgtcatct

SEQ ID NO: 249 - DNA, 19 bp, synthetic construct
  misc_feature 1..19: note = Synthetic DNA primer, F146
  modified_base 10: mod_base = OTHER; note = uracil
  modified_base 17: mod_base = OTHER; note = uracil
  source 1..19: mol_type = other DNA
gagagctggtggaggctga

SEQ ID NO: 250 - DNA, 22 bp, synthetic construct
  misc_feature 1..22: note = Synthetic DNA primer, F147
  modified_base 4: mod_base = OTHER; note = uracil
  modified_base 19: mod_base = OTHER; note = uracil
  source 1..22: mol_type = other DNA
gagtgaccgaggacaacgtgat

SEQ ID NO: 251 - DNA, 22 bp, synthetic construct
  misc_feature 1..22: note = Synthetic DNA primer, F148
  modified_base 6: mod_base = OTHER; note = uracil
  modified_base 16: mod_base = OTHER; note = uracil
  source 1..22: mol_type = other DNA
gactctgggagatcttcacgct

SEQ ID NO: 252 - DNA, 22 bp, synthetic construct
  misc_feature 1..22: note = Synthetic DNA primer, F149
  modified_base 13: mod_base = OTHER; note = uracil
  modified_base 21: mod_base = OTHER; note = uracil
  source 1..22: mol_type = other DNA
gaggattgcagattgggccttg

SEQ ID NO: 253 - DNA, 30 bp, synthetic construct
  misc_feature 1..30: note = Synthetic DNA primer, F150
  modified_base 11: mod_base = OTHER; note = uracil
  modified_base 20: mod_base = OTHER; note = uracil
  source 1..30: mol_type = other DNA
gaataatccattgcctgtctaaagaacact

SEQ ID NO: 254 - DNA, 25 bp, synthetic construct
  misc_feature 1..25: note = Synthetic DNA primer, F151
  modified_base 10: mod_base = OTHER; note = uracil
  modified_base 19: mod_base = OTHER; note = uracil
  source 1..25: mol_type = other DNA
gagacttggtgttgttgatggcaaa

SEQ ID NO: 255 - DNA, 27 bp, synthetic construct
  misc_feature 1..27: note = Synthetic DNA primer, F152
  modified_base 9: mod_base = OTHER; note = uracil
  modified_base 21: mod_base = OTHER; note = uracil
  source 1..27: mol_type = other DNA
gaccaacatgacttacttgatccccat

SEQ ID NO: 256 - DNA, 20 bp, synthetic construct
  misc_feature 1..20: note = Synthetic DNA primer, F153
  modified_base 7: mod_base = OTHER; note = uracil
  modified_base 19: mod_base = OTHER; note = uracil
  source 1..20: mol_type = other DNA
gaaccctggcctacctggtc

SEQ ID NO: 257 - DNA, 26 bp, synthetic construct
  misc_feature 1..26: note = Synthetic DNA primer, F154
  modified_base 15: mod_base = OTHER; note = uracil
  modified_base 20: mod_base = OTHER; note = uracil
  source 1..26: mol_type = other DNA
gatgaagcagcaagtatgatgagcaa

SEQ ID NO: 258 - DNA, 25 bp, synthetic construct
  misc_feature 1..25: note = Synthetic DNA primer, F155
  modified_base 11: mod_base = OTHER; note = uracil
  modified_base 24: mod_base = OTHER; note = uracil
  source 1..25: mol_type = other DNA
gaggcacggttgaatgtaaggctta

SEQ ID NO: 259 - DNA, 23 bp, synthetic construct
  misc_feature 1..23: note = Synthetic DNA primer, F156
  modified_base 11: mod_base = OTHER; note = uracil
  modified_base 22: mod_base = OTHER; note = uracil
  source 1..23: mol_type = other DNA
gaccacaccctgttcactccttt

SEQ ID NO: 260 - DNA, 28 bp, synthetic construct
  misc_feature 1..28: note = Synthetic DNA primer, F157
  modified_base 12: mod_base = OTHER; note = uracil
  modified_base 26: mod_base = OTHER; note = uracil
  source 1..28: mol_type = other DNA
gaaaggtgatctatttttccctttctcc

SEQ ID NO: 261 - DNA, 29 bp, synthetic construct
  misc_feature 1..29: note = Synthetic DNA primer, F158
  modified_base 12: mod_base = OTHER; note = uracil
  modified_base 25: mod_base = OTHER; note = uracil
  source 1..29: mol_type = other DNA
gagctttttgctaaaatgcatgtttccaa

SEQ ID NO: 262 - DNA, 29 bp, synthetic construct
  misc_feature 1..29: note = Synthetic DNA primer, F159
  modified_base 13: mod_base = OTHER; note = uracil
  modified_base 27: mod_base = OTHER; note = uracil
  source 1..29: mol_type = other DNA
gacaaagaatggtcctgcaccagtaatat

SEQ ID NO: 263 - DNA, 25 bp, synthetic construct
  misc_feature 1..25: note = Synthetic DNA primer, F160
  modified_base 11: mod_base = OTHER; note = uracil
  modified_base 24: mod_base = OTHER; note = uracil
  source 1..25: mol_type = other DNA
gatcctcatgtactggtccctcatt

SEQ ID NO: 264 - DNA, 34 bp, synthetic construct
  misc_feature 1..34: note = Synthetic DNA primer, F161
  modified_base 14: mod_base = OTHER; note = uracil
  modified_base 30: mod_base = OTHER; note = uracil
  source 1..34: mol_type = other DNA
gacagatctgtatttatttcagtgttacttacct

SEQ ID NO: 265 - DNA, 29 bp, synthetic construct
  misc_feature 1..29: note = Synthetic DNA primer, F162
  modified_base 13: mod_base = OTHER; note = uracil
  modified_base 23: mod_base = OTHER; note = uracil
  source 1..29: mol_type = other DNA
gacatgtcaacatcgctctaattcagaga

SEQ ID NO: 266 - DNA, 25 bp, synthetic construct
  misc_feature 1..25: note = Synthetic DNA primer, F163
  modified_base 13: mod_base = OTHER; note = uracil
  modified_base 24: mod_base = OTHER; note = uracil
  source 1..25: mol_type = other DNA
gatgttacgcagtgctaaccaagtt

SEQ ID NO: 267 - DNA, 24 bp, synthetic construct
  misc_feature 1..24: note = Synthetic DNA primer, F164
  modified_base 8: mod_base = OTHER; note = uracil
  modified_base 17: mod_base = OTHER; note = uracil
  source 1..24: mol_type = other DNA
gagctgattttggtcttgccagag

SEQ ID NO: 268 - DNA, 27 bp, synthetic construct
  misc_feature 1..27: note = Synthetic DNA primer, F165
  modified_base 12: mod_base = OTHER; note = uracil
  modified_base 25: mod_base = OTHER; note = uracil
  source 1..27: mol_type = other DNA
gacctcacctctatggtgggatcatat

SEQ ID NO: 269 - DNA, 24 bp, synthetic construct
  misc_feature 1..24: note = Synthetic DNA primer, F166
  modified_base 11: mod_base = OTHER; note = uracil
  modified_base 22: mod_base = OTHER; note = uracil
  source 1..24: mol_type = other DNA
gattcgcctgtcctcatgtattgg

SEQ ID NO: 270 - DNA, 25 bp, synthetic construct
  misc_feature 1..25: note = Synthetic DNA primer, F167
  modified_base 7: mod_base = OTHER; note = uracil
  modified_base 22: mod_base = OTHER; note = uracil
  source 1..25: mol_type = other DNA
gagcactgggactttggtaattcac

SEQ ID NO: 271 - DNA, 28 bp, synthetic construct
  misc_feature 1..28: note = Synthetic DNA primer, F168
  modified_base 18: mod_base = OTHER; note = uracil
  modified_base 27: mod_base = OTHER; note = uracil
  source 1..28: mol_type = other DNA
gacagtgaaaaacaagctctcatgtctg

SEQ ID NO: 272 - DNA, 22 bp, synthetic construct
  misc_feature 1..22: note = Synthetic DNA primer, F169
  modified_base 10: mod_base = OTHER; note = uracil
  modified_base 20: mod_base = OTHER; note = uracil
  source 1..22: mol_type = other DNA
gacagtgtgtccaccgtgatct

SEQ ID NO: 273 - DNA, 30 bp, synthetic construct
  misc_feature 1..30: note = Synthetic DNA primer, F170
  modified_base 17: mod_base = OTHER; note = uracil
  modified_base 27: mod_base = OTHER; note = uracil
  source 1..30: mol_type = other DNA
gatggaatgccagaactacaatcttttgat

SEQ ID NO: 274 - DNA, 23 bp, synthetic construct
  misc_feature 1..23: note = Synthetic DNA primer, F171
  modified_base 9: mod_base = OTHER; note = uracil
  modified_base 19: mod_base = OTHER; note = uracil
  source 1..23: mol_type = other DNA
gagacgcatttccacagctacac

SEQ ID NO: 275 - DNA, 26 bp, synthetic construct
  misc_feature 1..26: note = Synthetic DNA primer, F172
  modified_base 11: mod_base = OTHER; note = uracil
  modified_base 22: mod_base = OTHER; note = uracil
  source 1..26: mol_type = other DNA
gagctttgaatctttggccagtacct

SEQ ID NO: 276 - DNA, 25 bp, synthetic construct
  misc_feature 1..25: note = Synthetic DNA primer, F173
  modified_base 13: mod_base = OTHER; note = uracil
  modified_base 23: mod_base = OTHER; note = uracil
  source 1..25: mol_type = other DNA
gagatgcagccattgacctgtttac

SEQ ID NO: 277 - DNA, 24 bp, synthetic construct
  misc_feature 1..24: note = Synthetic DNA primer, F174
  modified_base 8: mod_base = OTHER; note = uracil
  modified_base 20: mod_base = OTHER; note = uracil
  source 1..24: mol_type = other DNA
gagggattaaagctggctatggca

SEQ ID NO: 278 - DNA, 21 bp, synthetic construct
  misc_feature 1..21: note = Synthetic DNA primer, F175
  modified_base 7: mod_base = OTHER; note = uracil
  modified_base 18: mod_base = OTHER; note = uracil
  source 1..21: mol_type = other DNA
gaagcatacgcagcctgtacc

SEQ ID NO: 279 - DNA, 22 bp, synthetic construct
  misc_feature 1..22: note = Synthetic DNA primer, F176
  modified_base 6: mod_base = OTHER; note = uracil
  modified_base 21: mod_base = OTHER; note = uracil
  source 1..22: mol_type = other DNA
gagcttccaggagcgatcgttt

SEQ ID NO: 280 - DNA, 22 bp, synthetic construct
  misc_feature 1..22: note = Synthetic DNA primer, F177
  modified_base 10: mod_base = OTHER; note = uracil
  modified_base 21: mod_base = OTHER; note = uracil
  source 1..22: mol_type = other DNA
gaagctcgttcatcgggacttg

SEQ ID NO: 281 - DNA, 25 bp, synthetic construct
  misc_feature 1..25: note = Synthetic DNA primer, F178
  modified_base 8: mod_base = OTHER; note = uracil
  modified_base 18: mod_base = OTHER; note = uracil
  source 1..25: mol_type = other DNA
gactggttactgaaagctcagggat

SEQ ID NO: 282 - DNA, 27 bp, synthetic construct
  misc_feature 1..27: note = Synthetic DNA primer, F179
  modified_base 11: mod_base = OTHER; note = uracil
  modified_base 26: mod_base = OTHER; note = uracil
  source 1..27: mol_type = other DNA
gaggactctgtgagtgggatttgtttt

SEQ ID NO: 283 - DNA, 26 bp, synthetic construct
  misc_feature 1..26: note = Synthetic DNA primer, F180
  modified_base 9: mod_base = OTHER; note = uracil
  modified_base 20: mod_base = OTHER; note = uracil
  source 1..26: mol_type = other DNA
gacatccctgactgtgagatcaagaa

SEQ ID NO: 284 - DNA, 22 bp, synthetic construct
  misc_feature 1..22: note = Synthetic DNA primer, F181
  modified_base 10: mod_base = OTHER; note = uracil
  modified_base 21: mod_base = OTHER; note = uracil
  source 1..22: mol_type = other DNA
gaatcaacctgcttggtgtctg

SEQ ID NO: 285 - DNA, 21 bp, synthetic construct
  misc_feature 1..21: note = Synthetic DNA primer, F182
  modified_base 12: mod_base = OTHER; note = uracil
  modified_base 20: mod_base = OTHER; note = uracil
  source 1..21: mol_type = other DNA
gaacgaggacctgtgggactc

SEQ ID NO: 286 - DNA, 22 bp, synthetic construct
  misc_feature 1..22: note = Synthetic DNA primer, F183
  modified_base 6: mod_base = OTHER; note = uracil
  modified_base 19: mod_base = OTHER; note = uracil
  source 1..22: mol_type = other DNA
gacattccccaacagctgtggt

SEQ ID NO: 287 - DNA, 22 bp, synthetic construct
  misc_feature 1..22: note = Synthetic DNA primer, F184
  modified_base 9: mod_base = OTHER; note = uracil
  modified_base 20: mod_base = OTHER; note = uracil
  source 1..22: mol_type = other DNA
gaccttcctcctgaaggcctga

SEQ ID NO: 288 - DNA, 21 bp, synthetic construct
  misc_feature 1..21: note = Synthetic DNA primer, F185
  modified_base 9: mod_base = OTHER; note = uracil
  modified_base 17: mod_base = OTHER; note = uracil
  source 1..21: mol_type = other DNA
gaaagtgcttgtgccctgcat

SEQ ID NO: 289 - DNA, 23 bp, synthetic construct
  misc_feature 1..23: note = Synthetic DNA primer, F186
  modified_base 10: mod_base = OTHER; note = uracil
  modified_base 21: mod_base = OTHER; note = uracil
  source 1..23: mol_type = other DNA
gacccctcttggaccttagatgc

SEQ ID NO: 290 - DNA, 24 bp, synthetic construct
  misc_feature 1..24: note = Synthetic DNA primer, F187
  modified_base 7: mod_base = OTHER; note = uracil
  modified_base 23: mod_base = OTHER; note = uracil
  source 1..24: mol_type = other DNA
gacgcatggagaagaaactgcatg

SEQ ID NO: 291 - DNA, 25 bp, synthetic construct
  misc_feature 1..25: note = Synthetic DNA primer, F188
  modified_base 10: mod_base = OTHER; note = uracil
  modified_base 21: mod_base = OTHER; note = uracil
  source 1..25: mol_type = other DNA
gatcccctatgtgcaagtcctaaag

SEQ ID NO: 292 - DNA, 22 bp, synthetic construct
  misc_feature 1..22: note = Synthetic DNA primer, F189
  modified_base 9: mod_base = OTHER; note = uracil
  modified_base 20: mod_base = OTHER; note = uracil
  source 1..22: mol_type = other DNA
gaccactgtgcagaagctctcc

SEQ ID NO: 293 - DNA, 19 bp, synthetic construct
  misc_feature 1..19: note = Synthetic DNA primer, F190
  modified_base 11: mod_base = OTHER; note = uracil
  modified_base 18: mod_base = OTHER; note = uracil
  source 1..19: mol_type = other DNA
gacgccggcctcgtgagtc

SEQ ID NO: 294 - DNA, 27 bp, synthetic construct
  misc_feature 1..27: note = Synthetic DNA primer, F191
  modified_base 10: mod_base = OTHER; note = uracil
  modified_base 24: mod_base = OTHER; note = uracil
  source 1..27: mol_type = other DNA
gacaaatgctgaaagctgtaccatacc

SEQ ID NO: 295 - DNA, 24 bp, synthetic construct
  misc_feature 1..24: note = Synthetic DNA primer, F192
  modified_base 11: mod_base = OTHER; note = uracil
  modified_base 23: mod_base = OTHER; note = uracil
  source 1..24: mol_type = other DNA
gatgaggcagtctttactcacctg

SEQ ID NO: 296 - DNA, 25 bp, synthetic construct
  misc_feature 1..25: note = Synthetic DNA primer, F193
  modified_base 11: mod_base = OTHER; note = uracil
  modified_base 21: mod_base = OTHER; note = uracil
  source 1..25: mol_type = other DNA
gagcaaagactggttctcactcacc

SEQ ID NO: 297 - DNA, 24 bp, synthetic construct
  misc_feature 1..24: note = Synthetic DNA primer, F194
  modified_base 6: mod_base = OTHER; note = uracil
  modified_base 13: mod_base = OTHER; note = uracil
  source 1..24: mol_type = other DNA
gacgatctgttctacacggaaccc

SEQ ID NO: 298 - DNA, 26 bp, synthetic construct
  misc_feature 1..26: note = Synthetic DNA primer, F195
  modified_base 14: mod_base = OTHER; note = uracil
  modified_base 25: mod_base = OTHER; note = uracil
  source 1..26: mol_type = other DNA
gaccagacaagcctacagtaggaatc

SEQ ID NO: 299 - DNA, 23 bp, synthetic construct
  misc_feature 1..23: note = Synthetic DNA primer, F196
  modified_base 15: mod_base = OTHER; note = uracil
  modified_base 21: mod_base = OTHER; note = uracil
  source 1..23: mol_type = other DNA
gactccacagaccctctccttgc

SEQ ID NO: 300 - DNA, 24 bp, synthetic construct
  misc_feature 1..24: note = Synthetic DNA primer, F197
  modified_base 11: mod_base = OTHER; note = uracil
  modified_base 23: mod_base = OTHER; note = uracil
  source 1..24: mol_type = other DNA
gaagggtgtctctctgtggcttta

SEQ ID NO: 301 - DNA, 25 bp, synthetic construct
  misc_feature 1..25: note = Synthetic DNA primer, F198
  modified_base 8: mod_base = OTHER; note = uracil
  modified_base 20: mod_base = OTHER; note = uracil
  source 1..25: mol_type = other DNA
gagtttctgcagattgacttgcaca

SEQ ID NO: 302 - DNA, 30 bp, synthetic construct
  misc_feature 1..30: note = Synthetic DNA primer, F199
  modified_base 17: mod_base = OTHER; note = uracil
  modified_base 26: mod_base = OTHER; note = uracil
  source 1..30: mol_type = other DNA
gatcaggaaacaaaaatttgtgctatgcaa

SEQ ID NO: 303 - DNA, 24 bp, synthetic construct
  misc_feature 1..24: note = Synthetic DNA primer, F200
  modified_base 14: mod_base = OTHER; note = uracil
  modified_base 21: mod_base = OTHER; note = uracil
  source 1..24: mol_type = other DNA
gagctggaggagctagagcttgat

SEQ ID NO: 304 - DNA, 24 bp, synthetic construct
  misc_feature 1..24: note = Synthetic DNA primer, F201
  modified_base 9: mod_base = OTHER; note = uracil
  modified_base 21: mod_base = OTHER; note = uracil
  source 1..24: mol_type = other DNA
gagggctgtcgtggtagacttaga

SEQ ID NO: 305 - DNA, 30 bp, synthetic construct
  misc_feature 1..30: note = Synthetic DNA primer, F202
  modified_base 11: mod_base = OTHER; note = uracil
  modified_base 27: mod_base = OTHER; note = uracil
  source 1..30: mol_type = other DNA
gaaagacttctcaaattgttgccatttcag

SEQ ID NO: 306 - DNA, 27 bp, synthetic construct
  misc_feature 1..27: note = Synthetic DNA primer, F203
  modified_base 19: mod_base = OTHER; note = uracil
  modified_base 26: mod_base = OTHER; note = uracil
  source 1..27: mol_type = other DNA
gacgaggaagaaaaacaatcccacttg

SEQ ID NO: 307 - DNA, 27 bp, synthetic construct
  misc_feature 1..27: note = Synthetic DNA primer, F204
  modified_base 12: mod_base = OTHER; note = uracil
  modified_base 26: mod_base = OTHER; note = uracil
  source 1..27: mol_type = other DNA
gagagatcctttcgaagtcatcgtctt

SEQ ID NO: 308 - DNA, 25 bp, synthetic construct
  misc_feature 1..25: note = Synthetic DNA primer, F205
  modified_base 9: mod_base = OTHER; note = uracil
  modified_base 20: mod_base = OTHER; note = uracil
  source 1..25: mol_type = other DNA
gagggcaatgtcaattagctggaac

SEQ ID NO: 309 - DNA, 27 bp, synthetic construct
  misc_feature 1..27: note = Synthetic DNA primer, F206
  modified_base 14: mod_base = OTHER; note = uracil
  modified_base 25: mod_base = OTHER; note = uracil
  source 1..27: mol_type = other DNA
gacactgtgttactgccatcgacttac

SEQ ID NO: 310 - DNA, 28 bp, synthetic construct
  misc_feature 1..28: note = Synthetic DNA primer, F207
  modified_base 12: mod_base = OTHER; note = uracil
  modified_base 26: mod_base = OTHER; note = uracil
  source 1..28: mol_type = other DNA
gacttttaccctcttcagctcagtttct

SEQ ID NO: 311 - DNA, 30 bp, synthetic construct
  misc_feature 1..30: note = Synthetic DNA primer, F208
  modified_base 15: mod_base = OTHER; note = uracil
  modified_base 26: mod_base = OTHER; note = uracil
  source 1..30: mol_type = other DNA
gatctcctccaacctaatagtgtattcaca

SEQ ID NO: 312 - DNA, 30 bp, synthetic construct
  misc_feature 1..30: note = Synthetic DNA primer, F209
  modified_base 8: mod_base = OTHER; note = uracil
  modified_base 18: mod_base = OTHER; note = uracil
  source 1..30: mol_type = other DNA
gatttcgtaagtgttactcaagaagcagaa

SEQ ID NO: 313 - DNA, 26 bp, synthetic construct
  misc_feature 1..26: note = Synthetic DNA primer, F210
  modified_base 16: mod_base = OTHER; note = uracil
  modified_base 22: mod_base = OTHER; note = uracil
  source 1..26: mol_type = other DNA
gaatgcccccaagaatcctagtagaa

SEQ ID NO: 314 - DNA, 31 bp, synthetic construct
  misc_feature 1..31: note = Synthetic DNA primer, F211
  modified_base 14: mod_base = OTHER; note = uracil
  modified_base 28: mod_base = OTHER; note = uracil
  source 1..31: mol_type = other DNA
gaagagatgattgttgaattttccttttggg

SEQ ID NO: 315 - DNA, 23 bp, synthetic construct
  misc_feature 1..23: note = Synthetic DNA primer, F212
  modified_base 9: mod_base = OTHER; note = uracil
  modified_base 18: mod_base = OTHER; note = uracil
  source 1..23: mol_type = other DNA
gacggaactcgaatcgctaccct

SEQ ID NO: 316 - DNA, 23 bp, synthetic construct
  misc_feature 1..23: note = Synthetic DNA primer, F213
  modified_base 11: mod_base = OTHER; note = uracil
  modified_base 21: mod_base = OTHER; note = uracil
  source 1..23: mol_type = other DNA
gactcgatgctgttcccaggtac

SEQ ID NO: 317 - DNA, 29 bp, synthetic construct
  misc_feature 1..29: note = Synthetic DNA primer, F214
  modified_base 15: mod_base = OTHER; note = uracil
  modified_base 26: mod_base = OTHER; note = uracil
  source 1..29: mol_type = other DNA
gatcatacagacacttcatttggagtacc

SEQ ID NO: 318 - DNA, 30 bp, synthetic construct
  misc_feature 1..30: note = Synthetic DNA primer, F215
  modified_base 15: mod_base = OTHER; note = uracil
  modified_base 28: mod_base = OTHER; note = uracil
  source 1..30: mol_type = other DNA
gaaaaaataaagcttggcttcaagttgtct

SEQ ID NO: 319 - DNA, 32 bp, synthetic construct
  misc_feature 1..32: note = Synthetic DNA primer, F216
  modified_base 14: mod_base = OTHER; note = uracil
  modified_base 31: mod_base = OTHER; note = uracil
  source 1..32: mol_type = other DNA
gaacattgtgaccttaattttgtgatctcttg

SEQ ID NO: 320 - DNA, 26 bp, synthetic construct
  misc_feature 1..26: note = Synthetic DNA primer, F217
  modified_base 12: mod_base = OTHER; note = uracil
  modified_base 25: mod_base = OTHER; note = uracil
  source 1..26: mol_type = other DNA
gaccccactcatgtttagcagatgta

SEQ ID NO: 321 - DNA, 26 bp, synthetic construct
  misc_feature 1..26: note = Synthetic DNA primer, F218
  modified_base 10: mod_base = OTHER; note = uracil
  modified_base 19: mod_base = OTHER; note = uracil
  source 1..26: mol_type = other DNA
gaggacaggttttgttgttgaggaag

SEQ ID NO: 322 - DNA, 35 bp, synthetic construct
  misc_feature 1..35: note = Synthetic DNA primer, F219
  modified_base 13: mod_base = OTHER; note = uracil
  modified_base 32: mod_base = OTHER; note = uracil
  source 1..35: mol_type = other DNA
gaagcaaggtcataaattattctccatattttcca

SEQ ID NO: 323 - DNA, 34 bp, synthetic construct
  misc_feature 1..34: note = Synthetic DNA primer, F220
  modified_base 14: mod_base = OTHER; note = uracil
  modified_base 29: mod_base = OTHER; note = uracil
  source 1..34: mol_type = other DNA
gatctttttaccttatagatgggaaacatgagag

SEQ ID NO: 324 - DNA, 33 bp, synthetic construct
  misc_feature 1..33: note = Synthetic DNA primer, F221
  modified_base 15: mod_base = OTHER; note = uracil
  modified_base 32: mod_base = OTHER; note = uracil
  source 1..33: mol_type = other DNA
gaatgtgtctttcatgagaaaaacaagatcatt

SEQ ID NO: 325 - DNA, 29 bp, synthetic construct
  misc_feature 1..29: note = Synthetic DNA primer, F222
  modified_base 13: mod_base = OTHER; note = uracil
  modified_base 28: mod_base = OTHER; note = uracil
  source 1..29: mol_type = other DNA
gatagtagctgatccacagaagttcagta

SEQ ID NO: 326 - DNA, 35 bp, synthetic construct
  misc_feature 1..35: note = Synthetic DNA primer, F223
  modified_base 14: mod_base = OTHER; note = uracil
  modified_base 32: mod_base = OTHER; note = uracil
  source 1..35: mol_type = other DNA
gaaagactctgaataccaccatcaagaataataaa

SEQ ID NO: 327 - DNA, 25 bp, synthetic construct
  misc_feature 1..25: note = Synthetic DNA primer, F224
  modified_base 16: mod_base = OTHER; note = uracil
  modified_base 24: mod_base = OTHER; note = uracil
  source 1..25: mol_type = other DNA
gaatctacaggccaatggttccttc

SEQ ID NO: 328 - DNA, 29 bp, synthetic construct
  misc_feature 1..29: note = Synthetic DNA primer, F225
  modified_base 11: mod_base = OTHER; note = uracil
  modified_base 25: mod_base = OTHER; note = uracil
  source 1..29: mol_type = other DNA
gagccagtagtcacaaagatttcttacca

SEQ ID NO: 329 - DNA, 22 bp, synthetic construct
  misc_feature 1..22: note = Synthetic DNA primer, F226
  modified_base 9: mod_base = OTHER; note = uracil
  modified_base 14: mod_base = OTHER; note = uracil
  source 1..22: mol_type = other DNA
gaagaagattgggtgggcagac

SEQ ID NO: 330 - DNA, 33 bp, synthetic construct
  misc_feature 1..33: note = Synthetic DNA primer, F227
  modified_base 16: mod_base = OTHER; note = uracil
  modified_base 30: mod_base = OTHER; note = uracil
  source 1..33: mol_type = other DNA
gaaaccactgatacatttttctactttcctgaa

SEQ ID NO: 331 - DNA, 32 bp, synthetic construct
  misc_feature 1..32: note = Synthetic DNA primer, F228
  modified_base 12: mod_base = OTHER; note = uracil
  modified_base 29: mod_base = OTHER; note = uracil
  source 1..32: mol_type = other DNA
gaagacttctttgagatatttccatagctcac

SEQ ID NO: 332 - DNA, 35 bp, synthetic construct
  misc_feature 1..35: note = Synthetic DNA primer, F229
  modified_base 17: mod_base = OTHER; note = uracil
  modified_base 31: mod_base = OTHER; note = uracil
  source 1..35: mol_type = other DNA
gacatttttgtttatgttattctctctacctcagc

SEQ ID NO: 333 - DNA, 34 bp, synthetic construct
  misc_feature 1..34: note = Synthetic DNA primer, F230
  modified_base 15: mod_base = OTHER; note = uracil
  modified_base 32: mod_base = OTHER; note = uracil
  source 1..34: mol_type = other DNA
gaagttataggtaatcgatgcatatagctcatct

SEQ ID NO: 334 - DNA, 34 bp, synthetic construct
  misc_feature 1..34: note = Synthetic DNA primer, F231
  modified_base 17: mod_base = OTHER; note = uracil
  modified_base 32: mod_base = OTHER; note = uracil
  source 1..34: mol_type = other DNA
gaaattgtttgtagggttggttattagtgactat

SEQ ID NO: 335 - DNA, 26 bp, synthetic construct
  misc_feature 1..26: note = Synthetic DNA primer, F232
  modified_base 11: mod_base = OTHER; note = uracil
  modified_base 23: mod_base = OTHER; note = uracil
  source 1..26: mol_type = other DNA
gaccactatgtaagacaaaggctggt

SEQ ID NO: 336 - DNA, 28 bp, synthetic construct
  misc_feature 1..28: note = Synthetic DNA primer, F233
  modified_base 10: mod_base = OTHER; note = uracil
  modified_base 26: mod_base = OTHER; note = uracil
  source 1..28: mol_type = other DNA
gagtttctgtagcccatactttggatga

SEQ ID NO: 337 - DNA, 25 bp, synthetic construct
  misc_feature 1..25: note = Synthetic DNA primer, F234
  modified_base 8: mod_base = OTHER; note = uracil
  modified_base 24: mod_base = OTHER; note = uracil
  source 1..25: mol_type = other DNA
gacactgtgaaggccctttcttctg

SEQ ID NO: 338 - DNA, 33 bp, synthetic construct
  misc_feature 1..33: note = Synthetic DNA primer, F235
  modified_base 16: mod_base = OTHER; note = uracil
  modified_base 32: mod_base = OTHER; note = uracil
  source 1..33: mol_type = other DNA
gagcataggagataatcataggaatcccaaatt

SEQ ID NO: 339 - DNA, 25 bp, synthetic construct
  misc_feature 1..25: note = Synthetic DNA primer, F236
  modified_base 14: mod_base = OTHER; note = uracil
  modified_base 23: mod_base = OTHER; note = uracil
  source 1..25: mol_type = other DNA
gaagtcactggaattgttgggctac

SEQ ID NO: 340 - DNA, 23 bp, synthetic construct
  misc_feature 1..23: note = Synthetic DNA primer, F237
  modified_base 5: mod_base = OTHER; note = uracil
  modified_base 16: mod_base = OTHER; note = uracil
  source 1..23: mol_type = other DNA
gacttccaggagccgtagagttt

SEQ ID NO: 341 - DNA, 31 bp, synthetic construct
  misc_feature 1..31: note = Synthetic DNA primer, F238
  modified_base 15: mod_base = OTHER; note = uracil
  modified_base 30: mod_base = OTHER; note = uracil
  source 1..31: mol_type = other DNA
gaactcttcctatttttgtagtgacctgttt

SEQ ID NO: 342 - DNA, 27 bp, synthetic construct
  misc_feature 1..27: note = Synthetic DNA primer, F239
  modified_base 10: mod_base = OTHER; note = uracil
  modified_base 26: mod_base = OTHER; note = uracil
  source 1..27: mol_type = other DNA
gattcctgataaagcacagctgtagtg

SEQ ID NO: 343 - DNA, 21 bp, synthetic construct
  misc_feature 1..21: note = Synthetic DNA primer, F240
  modified_base 7: mod_base = OTHER; note = uracil
  modified_base 19: mod_base = OTHER; note = uracil
  source 1..21: mol_type = other DNA
gattgttcaagcagcgagtcc

SEQ ID NO: 344 - DNA, 23 bp, synthetic construct
  misc_feature 1..23: note = Synthetic DNA primer, F241
  modified_base 10: mod_base = OTHER; note = uracil
  modified_base 22: mod_base = OTHER; note = uracil
  source 1..23: mol_type = other DNA
gacatgaactacctggaccgctt

SEQ ID NO: 345 - DNA, 22 bp, synthetic construct
  misc_feature 1..22: note = Synthetic DNA primer, F242
  modified_base 10: mod_base = OTHER; note = uracil
  modified_base 20: mod_base = OTHER; note = uracil
  source 1..22: mol_type = other DNA
gaggtgctgtctgggaagatgt

SEQ ID NO: 346 - DNA, 25 bp, synthetic construct
  misc_feature 1..25: note = Synthetic DNA primer, F243
  modified_base 13: mod_base = OTHER; note = uracil
  modified_base 23: mod_base = OTHER; note = uracil
  source 1..25: mol_type = other DNA
gaaaagaggcagtagcatcttctcc

SEQ ID NO: 347 - DNA, 28 bp, synthetic construct
  misc_feature 1..28: note = Synthetic DNA primer, F244
  modified_base 14: mod_base = OTHER; note = uracil
  modified_base 27: mod_base = OTHER; note = uracil
  source 1..28: mol_type = other DNA
gaaatcctggagctttggtgtctaattc

SEQ ID NO: 348 - DNA, 21 bp, synthetic construct
  misc_feature 1..21: note = Synthetic DNA primer, F245
  modified_base 14: mod_base = OTHER; note = uracil
  modified_base 20: mod_base = OTHER; note = uracil
  source 1..21: mol_type = other DNA
gatgcagaagcggtttctgtg

SEQ ID NO: 349 - DNA, 27 bp, synthetic construct
  misc_feature 1..27: note = Synthetic DNA primer, F246
  modified_base 13: mod_base = OTHER; note = uracil
  modified_base 26: mod_base = OTHER; note = uracil
  source 1..27: mol_type = other DNA
gagcctcagagataaaggcaaagattg

SEQ ID NO: 350 - DNA, 34 bp, synthetic construct
  misc_feature 1..34: note = Synthetic DNA primer, F247
  modified_base 16: mod_base = OTHER; note = uracil
  modified_base 32: mod_base = OTHER; note = uracil
  source 1..34: mol_type = other DNA
gaaccattatttctttgttttgtttttcctgtat

SEQ ID NO: 351 - DNA, 29 bp, synthetic construct
  misc_feature 1..29: note = Synthetic DNA primer, F248
  modified_base 14: mod_base = OTHER; note = uracil
  modified_base 20: mod_base = OTHER; note = uracil
  source 1..29: mol_type = other DNA
gataccaaccaagtttcattaaccacagt

SEQ ID NO: 352 - DNA, 30 bp, synthetic construct
  misc_feature 1..30: note = Synthetic DNA primer, F249
  modified_base 12: mod_base = OTHER; note = uracil
  modified_base 29: mod_base = OTHER; note = uracil
  source 1..30: mol_type = other DNA
gaccatgttggtcacttactcaaagatttt

SEQ ID NO: 353 - DNA, 24 bp, synthetic construct
  misc_feature 1..24: note = Synthetic DNA primer, F250
  modified_base 14: mod_base = OTHER; note = uracil
  modified_base 22: mod_base = OTHER; note = uracil
  source 1..24: mol_type = other DNA
gaaatgggcaaggtatggatgtgg

SEQ ID NO: 354 - DNA, 23 bp, synthetic construct
  misc_feature 1..23: note = Synthetic DNA primer, F251
  modified_base 10: mod_base = OTHER; note = uracil
  modified_base 22: mod_base = OTHER; note = uracil
  source 1..23: mol_type = other DNA
gatggcgcatcagatcctagttt

SEQ ID NO: 355 - DNA, 32 bp, synthetic construct
  misc_feature 1..32: note = Synthetic DNA primer, F252
  modified_base 13: mod_base = OTHER; note = uracil
  modified_base 31: mod_base = OTHER; note = uracil
  source 1..32: mol_type = other DNA
gatgtaacaacctaaagggaataggaagaatg

SEQ ID NO: 356 - DNA, 22 bp, synthetic construct
  misc_feature 1..22: note = Synthetic DNA primer, F253
  modified_base 11: mod_base = OTHER; note = uracil
  modified_base 21: mod_base = OTHER; note = uracil
  source 1..22: mol_type = other DNA
gaggcactggttctcattcctg

SEQ ID NO: 357 - DNA, 25 bp, synthetic construct
  misc_feature 1..25: note = Synthetic DNA primer, F254
  modified_base 12: mod_base = OTHER; note = uracil
  modified_base 22: mod_base = OTHER; note = uracil
  source 1..25: mol_type = other DNA
gaatgactcaataccaacccctcca

SEQ ID NO: 358 - DNA, 32 bp, synthetic construct
  misc_feature 1..32: note = Synthetic DNA primer, F255
  modified_base 14: mod_base = OTHER; note = uracil
  modified_base 29: mod_base = OTHER; note = uracil
  source 1..32: mol_type = other DNA
gacataaccatgatattaataggactcctgct

SEQ ID NO: 359 - DNA, 29 bp, synthetic construct
  misc_feature 1..29: note = Synthetic DNA primer, F256
  modified_base 16: mod_base = OTHER; note = uracil
  modified_base 25: mod_base = OTHER; note = uracil
  source 1..29: mol_type = other DNA
gatgaacgcaaaacctgttgaagttaaaa

SEQ ID NO: 360 - DNA, 34 bp, synthetic construct
  misc_feature 1..34: note = Synthetic DNA primer, F257
  modified_base 17: mod_base = OTHER; note = uracil
  modified_base 31: mod_base = OTHER; note = uracil
  source 1..34: mol_type = other DNA
gacttaaaaatgtcaatatctggcctcaaatacg

SEQ ID NO: 361 - DNA, 33 bp, synthetic construct
  misc_feature 1..33: note = Synthetic DNA primer, F258
  modified_base 13: mod_base = OTHER; note = uracil
  modified_base 29: mod_base = OTHER; note = uracil
  source 1..33: mol_type = other DNA
gagggaagcaatttgctacactttaatttaaac

SEQ ID NO: 362 - DNA, 26 bp, synthetic construct
  misc_feature 1..26: note = Synthetic DNA primer, F259
  modified_base 11: mod_base = OTHER; note = uracil
  modified_base 20: mod_base = OTHER; note = uracil
  source 1..26: mol_type = other DNA
gaacagaagcttctaatcctcaacgt

SEQ ID NO: 363 - DNA, 27 bp, synthetic construct
  misc_feature 1..27: note = Synthetic DNA primer, F260
  modified_base 9: mod_base = OTHER; note = uracil
  modified_base 22: mod_base = OTHER; note = uracil
  source 1..27: mol_type = other DNA
gaagttgatgccaattcacaatcacca

SEQ ID NO: 364 - DNA, 33 bp, synthetic construct
  misc_feature 1..33: note = Synthetic DNA primer, F261
  modified_base 14: mod_base = OTHER; note = uracil
  modified_base 32: mod_base = OTHER; note = uracil
  source 1..33: mol_type = other DNA
gactgaggtctattcactttcttttcatctttg

SEQ ID NO: 365 - DNA, 30 bp, synthetic construct
  misc_feature 1..30: note = Synthetic DNA primer, F262
  modified_base 15: mod_base = OTHER; note = uracil
  modified_base 29: mod_base = OTHER; note = uracil
  source 1..30: mol_type = other DNA
gactatttgtttcttccccatggaattgtc

SEQ ID NO: 366 - DNA, 26 bp, synthetic construct
  misc_feature 1..26: note = Synthetic DNA primer, F263
  modified_base 10: mod_base = OTHER; note = uracil
  modified_base 21: mod_base = OTHER; note = uracil
  source 1..26: mol_type = other DNA
gataatctttgaactgcctgtgcact

SEQ ID NO: 367 - DNA, 25 bp, synthetic construct
  misc_feature 1..25: note = Synthetic DNA primer, F264
  modified_base 9: mod_base = OTHER; note = uracil
  modified_base 21: mod_base = OTHER; note = uracil
  source 1..25: mol_type = other DNA
gaaagcaatggcttgggaagtaaga

SEQ ID NO: 368 - DNA, 35 bp, synthetic construct
  misc_feature 1..35: note = Synthetic DNA primer, F265
  modified_base 17: mod_base = OTHER; note = uracil
  modified_base 34: mod_base = OTHER; note = uracil
  source 1..35: mol_type = other DNA
gatctaaaggtttttctgatttcctcattaggatt

SEQ ID NO: 369 - DNA, 31 bp, synthetic construct
  misc_feature 1..31: note = Synthetic DNA primer, F266
  modified_base 14: mod_base = OTHER; note = uracil
  modified_base 28: mod_base = OTHER; note = uracil
  source 1..31: mol_type = other DNA
gatccagtcattttgagaaagacaacttact

SEQ ID NO: 370 - DNA, 34 bp, synthetic construct
  misc_feature 1..34: note = Synthetic DNA primer, F267
  modified_base 16: mod_base = OTHER; note = uracil
  modified_base 33: mod_base = OTHER; note = uracil
  source 1..34: mol_type = other DNA
gattcattaatattttcagatcaccagttgattg

SEQ ID NO: 371 - DNA, 35 bp, synthetic construct
  misc_feature 1..35: note = Synthetic DNA primer, F268
  modified_base 15: mod_base = OTHER; note = uracil
  modified_base 33: mod_base = OTHER; note = uracil
  source 1..35: mol_type = other DNA
gaattaactgtacctccaactttcttactatatgc

SEQ ID NO: 372 - DNA, 32 bp, synthetic construct
  misc_feature 1..32: note = Synthetic DNA primer, F269
  modified_base 12: mod_base = OTHER; note = uracil
  modified_base 28: mod_base = OTHER; note = uracil
  source 1..32: mol_type = other DNA
gattaagaaactagaaactgtttagactgcct

SEQ ID NO: 373 - DNA, 23 bp, synthetic construct
  misc_feature 1..23: note = Synthetic DNA primer, F270
  modified_base 11: mod_base = OTHER; note = uracil
  modified_base 21: mod_base = OTHER; note = uracil
  source 1..23: mol_type = other DNA
gatggttctgtcgactaaactgc

SEQ ID NO: 374 - DNA, 26 bp, synthetic construct
  misc_feature 1..26: note = Synthetic DNA primer, F271
  modified_base 11: mod_base = OTHER; note = uracil
  modified_base 24: mod_base = OTHER; note = uracil
  source 1..26: mol_type = other DNA
gaacggacactatgtccttaagctga

SEQ ID NO: 375 - DNA, 22 bp, synthetic construct
  misc_feature 1..22: note = Synthetic DNA primer, F272
  modified_base 9: mod_base = OTHER; note = uracil
  modified_base 18: mod_base = OTHER; note = uracil
  source 1..22: mol_type = other DNA
gattggcatggcttctctagct

SEQ ID NO: 376 - DNA, 22 bp, synthetic construct
  misc_feature 1..22: note = Synthetic DNA primer, F273
  modified_base 10: mod_base = OTHER; note = uracil
  modified_base 20: mod_base = OTHER; note = uracil
  source 1..22: mol_type = other DNA
gacaccttctaccgctcactgc

SEQ ID NO: 377 - DNA, 24 bp, synthetic construct
  misc_feature 1..24: note = Synthetic DNA primer, F274
  modified_base 9: mod_base = OTHER; note = uracil
  modified_base 17: mod_base = OTHER; note = uracil
  source 1..24: mol_type = other DNA
gaattgactctgaatgtcggccaa

SEQ ID NO: 378 - DNA, 24 bp, synthetic construct
  misc_feature 1..24: note = Synthetic DNA primer, F275
  modified_base 12: mod_base = OTHER; note = uracil
  modified_base 21: mod_base = OTHER; note = uracil
  source 1..24: mol_type = other DNA
gactctgcccctaagaaacctgga

SEQ ID NO: 379 - DNA, 27 bp, synthetic construct
  misc_feature 1..27: note = Synthetic DNA primer, F276
  modified_base 10: mod_base = OTHER; note = uracil
  modified_base 21: mod_base = OTHER; note = uracil
  source 1..27: mol_type = other DNA
gaattactctaactttcgcatgcacac

SEQ ID NO: 380 - DNA, 21 bp, synthetic construct
  misc_feature 1..21: note = Synthetic DNA primer, F277
  modified_base 5: mod_base = OTHER; note = uracil
  modified_base 19: mod_base = OTHER; note = uracil
  source 1..21: mol_type = other DNA
gaagtgggcagcagtttctga

SEQ ID NO: 381 - DNA, 27 bp, synthetic construct
  misc_feature 1..27: note = Synthetic DNA primer, F278
  modified_base 13: mod_base = OTHER; note = uracil
  modified_base 25: mod_base = OTHER; note = uracil
  source 1..27: mol_type = other DNA
gaaaccaactgcttgtatgctttctgg

SEQ ID NO: 382 - DNA, 21 bp, synthetic construct
  misc_feature 1..21: note = Synthetic DNA primer, F279
  modified_base 9: mod_base = OTHER; note = uracil
  modified_base 18: mod_base = OTHER; note = uracil
  source 1..21: mol_type = other DNA
gagcagccttacctggttgga

SEQ ID NO: 383 - DNA, 22 bp, synthetic construct
  misc_feature 1..22: note = Synthetic DNA primer, F280
  modified_base 10: mod_base = OTHER; note = uracil
  modified_base 17: mod_base = OTHER; note = uracil
  source 1..22: mol_type = other DNA
gattacagctcgttggtgcagt

SEQ ID NO: 384 - DNA, 26 bp, synthetic construct
  misc_feature 1..26: note = Synthetic DNA primer, F281
  modified_base 13: mod_base = OTHER; note = uracil
  modified_base 25: mod_base = OTHER; note = uracil
  source 1..26: mol_type = other DNA
gaatggaaaccctgacagagtctttg

SEQ ID NO: 385 - DNA, 26 bp, synthetic construct
  misc_feature 1..26: note = Synthetic DNA primer, F282
  modified_base 13: mod_base = OTHER; note = uracil
  modified_base 22: mod_base = OTHER; note = uracil
  source 1..26: mol_type = other DNA
gatgttatgagcttagcaccttgcag

SEQ ID NO: 386 - DNA, 24 bp, synthetic construct
  misc_feature 1..24: note = Synthetic DNA primer, F283
  modified_base 10: mod_base = OTHER; note = uracil
  modified_base 23: mod_base = OTHER; note = uracil
  source 1..24: mol_type = other DNA
gaccagttctgcagttagaggttg

SEQ ID NO: 387 - DNA, 30 bp, synthetic construct
  misc_feature 1..30: note = Synthetic DNA primer, F284
  modified_base 15: mod_base = OTHER; note = uracil
  modified_base 26: mod_base = OTHER; note = uracil
  source 1..30: mol_type = other DNA
gatttgattcttaatcacctaaggatggct

SEQ ID NO: 388 - DNA, 24 bp, synthetic construct
  misc_feature 1..24: note = Synthetic DNA primer, F285
  modified_base 12: mod_base = OTHER; note = uracil
  modified_base 23: mod_base = OTHER; note = uracil
  source 1..24: mol_type = other DNA
gaatccgtaccttccaccaatctg

SEQ ID NO: 389 - DNA, 35 bp, synthetic construct
  misc_feature 1..35: note = Synthetic DNA primer, F286
  modified_base 15: mod_base = OTHER; note = uracil
  modified_base 30: mod_base = OTHER; note = uracil
  source 1..35: mol_type = other DNA
gatataacaatgaatgaccaaaaggaaattaacaa

SEQ ID NO: 390 - DNA, 31 bp, synthetic construct
  misc_feature 1..31: note = Synthetic DNA primer, F287
  modified_base 15: mod_base = OTHER; note = uracil
  modified_base 30: mod_base = OTHER; note = uracil
  source 1..31: mol_type = other DNA
gataactttccatatgcaaacctactggcta

SEQ ID NO: 391 - DNA, 23 bp, synthetic construct
  misc_feature 1..23: note = Synthetic DNA primer, F288
  modified_base 5: mod_base = OTHER; note = uracil
  modified_base 14: mod_base = OTHER; note = uracil
  source 1..23: mol_type = other DNA
gacctggacgtcttggaaaaggg

SEQ ID NO: 392 - DNA, 22 bp, synthetic construct
  misc_feature 1..22: note = Synthetic DNA primer, F289
  modified_base 9: mod_base = OTHER; note = uracil
  modified_base 16: mod_base = OTHER; note = uracil
  source 1..22: mol_type = other DNA
gatctgggtcaaggatggcaca

SEQ ID NO: 393 - DNA, 21 bp, synthetic construct
  misc_feature 1..21: note = Synthetic DNA primer, F290
  modified_base 9: mod_base = OTHER; note = uracil
  modified_base 17: mod_base = OTHER; note = uracil
  source 1..21: mol_type = other DNA
gagcccacttcccatctgggt

SEQ ID NO: 394 - DNA, 20 bp, synthetic construct
  misc_feature 1..20: note = Synthetic DNA primer, F291
  modified_base 10: mod_base = OTHER; note = uracil
  modified_base 15: mod_base = OTHER; note = uracil
  source 1..20: mol_type = other DNA
gatccccgctgctgtgcaac

SEQ ID NO: 395 - DNA, 21 bp, synthetic construct
  misc_feature 1..21: note = Synthetic DNA primer, F292
  modified_base 11: mod_base = OTHER; note = uracil
  modified_base 20: mod_base = OTHER; note = uracil
  source 1..21: mol_type = other DNA
gacccacatgtccagcacctt

SEQ ID NO: 396 - DNA, 24 bp, synthetic construct
  misc_feature 1..24: note = Synthetic DNA primer, F293
  modified_base 8: mod_base = OTHER; note = uracil
  modified_base 20: mod_base = OTHER; note = uracil
  source 1..24: mol_type = other DNA
gagctggtgaaacaggtagtgagt

SEQ ID NO: 397 - DNA, 22 bp, synthetic construct
  misc_feature 1..22: note = Synthetic DNA primer, F294
  modified_base 10: mod_base = OTHER; note = uracil
  modified_base 18: mod_base = OTHER; note = uracil
  source 1..22: mol_type = other DNA
gactccaggtccttgtgtgagc

SEQ ID NO: 398 - DNA, 23 bp, synthetic construct
  misc_feature 1..23: note = Synthetic DNA primer, F295
  modified_base 13: mod_base = OTHER; note = uracil
  modified_base 21: mod_base = OTHER; note = uracil
  source 1..23: mol_type = other DNA
gacctcacgaactgtgctgatgg

SEQ ID NO: 399 - DNA, 26 bp, synthetic construct
  misc_feature 1..26: note = Synthetic DNA primer, F296
  modified_base 15: mod_base = OTHER; note = uracil
  modified_base 25: mod_base = OTHER; note = uracil
  source 1..26: mol_type = other DNA
gaggattcgagaagtgacaggctatg

SEQ ID NO: 400 - DNA, 25 bp, synthetic construct
  misc_feature 1..25: note = Synthetic DNA primer, F297
  modified_base 12: mod_base = OTHER; note = uracil
  modified_base 24: mod_base = OTHER; note = uracil
  source 1..25: mol_type = other DNA
gaattggtagctggtgatgttcctc

SEQ ID NO: 401 - DNA, 29 bp, synthetic construct
  misc_feature 1..29: note = Synthetic DNA primer, F298
  modified_base 11: mod_base = OTHER; note = uracil
  modified_base 22: mod_base = OTHER; note = uracil
  source 1..29: mol_type = other DNA
gacagctaattcatctggagatcaaaccc

SEQ ID NO: 402 - DNA, 30 bp, synthetic construct
  misc_feature 1..30: note = Synthetic DNA primer, F299
  modified_base 14: mod_base = OTHER; note = uracil
  modified_base 29: mod_base = OTHER; note = uracil
  source 1..30: mol_type = other DNA
gatgtcagttccctccttttctattttctc

SEQ ID NO: 403 - DNA, 21 bp, synthetic construct
  misc_feature 1..21: note = Synthetic DNA primer, F300
  modified_base 12: mod_base = OTHER; note = uracil
  modified_base 18: mod_base = OTHER; note = uracil
  source 1..21: mol_type = other DNA
gatgggcacggtaatgctgct

SEQ ID NO: 404 - DNA, 20 bp, synthetic construct
  misc_feature 1..20: note = Synthetic DNA primer, F301
  modified_base 6: mod_base = OTHER; note = uracil
  modified_base 15: mod_base = OTHER; note = uracil
  source 1..20: mol_type = other DNA
gactctgcggtggttggcat

SEQ ID NO: 405 - DNA, 24 bp, synthetic construct
  misc_feature 1..24: note = Synthetic DNA primer, F302
  modified_base 10: mod_base = OTHER; note = uracil
  modified_base 23: mod_base = OTHER; note = uracil
  source 1..24: mol_type = other DNA
gactccacctccaggaacttactc

SEQ ID NO: 406 - DNA, 29 bp, synthetic construct
  misc_feature 1..29: note = Synthetic DNA primer, F303
  modified_base 12: mod_base = OTHER; note = uracil
  modified_base 28: mod_base = OTHER; note = uracil
  source 1..29: mol_type = other DNA
gagggatcttgtgaaatgtcatctgactc

SEQ ID NO: 407 - DNA, 29 bp, synthetic construct
  misc_feature 1..29: note = Synthetic DNA primer, F304
  modified_base 13: mod_base = OTHER; note = uracil
  modified_base 28: mod_base = OTHER; note = uracil
  source 1..29: mol_type = other DNA
gatcaaccctgtttttctccctcttattg

SEQ ID NO: 408 - DNA, 26 bp, synthetic construct
  misc_feature 1..26: note = Synthetic DNA primer, F305
  modified_base 6: mod_base = OTHER; note = uracil
  modified_base 18: mod_base = OTHER; note = uracil
  source 1..26: mol_type = other DNA
gactgtacagcatgaagtgcaagaac

SEQ ID NO: 409 - DNA, 26 bp, synthetic construct
  misc_feature 1..26: note = Synthetic DNA primer, F306
  modified_base 12: mod_base = OTHER; note = uracil
  modified_base 25: mod_base = OTHER; note = uracil
  source 1..26: mol_type = other DNA
gaccattaacatggcctaccagagtt

SEQ ID NO: 410 - DNA, 24 bp, synthetic construct
  misc_feature 1..24: note = Synthetic DNA primer, F307
  modified_base 8: mod_base = OTHER; note = uracil
  modified_base 23: mod_base = OTHER; note = uracil
  source 1..24: mol_type = other DNA
gattgcctagacagcaccgtaatg

SEQ ID NO: 411 - DNA, 25 bp, synthetic construct
  misc_feature 1..25: note = Synthetic DNA primer, F308
  modified_base 10: mod_base = OTHER; note = uracil
  modified_base 23: mod_base = OTHER; note = uracil
  source 1..25: mol_type = other DNA
gagacgcagtttcttcttctcatcg

SEQ ID NO: 412 - DNA, 30 bp, synthetic construct
  misc_feature 1..30: note = Synthetic DNA primer, F309
  modified_base 14: mod_base = OTHER; note = uracil
  modified_base 29: mod_base = OTHER; note = uracil
  source 1..30: mol_type = other DNA
gatatcgagtgtgtgcatatgtgtatgttg

SEQ ID NO: 413 - RNA, 27 nt, synthetic construct
  misc_feature 1..27: note = Synthetic Primer, F310
  source 1..27: mol_type = other RNA
gaagggaaaatgacaaagaacagctca

SEQ ID NO: 414 - DNA, 23 bp, synthetic construct
  misc_feature 1..23: note = Synthetic DNA primer, F311
  modified_base 10: mod_base = OTHER; note = uracil
  modified_base 21: mod_base = OTHER; note = uracil
  source 1..23: mol_type = other DNA
gaggcctgcttttggagtcctat

SEQ ID NO: 415 - DNA, 23 bp, synthetic construct
  misc_feature 1..23: note = Synthetic DNA primer, F312
  modified_base 11: mod_base = OTHER; note = uracil
  modified_base 20: mod_base = OTHER; note = uracil
  source 1..23: mol_type = other DNA
gagaagagcctccaccatctcca

SEQ ID NO: 416 - DNA, 26 bp, synthetic construct
  misc_feature 1..26: note = Synthetic DNA primer, F313
  modified_base 9: mod_base = OTHER; note = uracil
  modified_base 20: mod_base = OTHER; note = uracil
  source 1..26: mol_type = other DNA
gacacacatgccatcattctaggaag

SEQ ID NO: 417 - DNA, 27 bp, synthetic construct
  misc_feature 1..27: note = Synthetic DNA primer, F314
  modified_base 10: mod_base = OTHER; note = uracil
  modified_base 25: mod_base = OTHER; note = uracil
  source 1..27: mol_type = other DNA
gagaggttttccagcactctgacatat

SEQ ID NO: 418 - DNA, 26 bp, synthetic construct
  misc_feature 1..26: note = Synthetic DNA primer, F315
  modified_base 12: mod_base = OTHER; note = uracil
  modified_base 22: mod_base = OTHER; note = uracil
  source 1..26: mol_type = other DNA
gatcttctctgtttcagggcatgaac

SEQ ID NO: 419 - DNA, 25 bp, synthetic construct
  misc_feature 1..25: note = Synthetic DNA primer, F316
  modified_base 9: mod_base = OTHER; note = uracil
  modified_base 24: mod_base = OTHER; note = uracil
  source 1..25: mol_type = other DNA
gaagattctgccgaaccaatggatc

SEQ ID NO: 420 - DNA, 28 bp, synthetic construct
  misc_feature 1..28: note = Synthetic DNA primer, F317
  modified_base 10: mod_base = OTHER; note = uracil
  modified_base 20: mod_base = OTHER; note = uracil
  source 1..28: mol_type = other DNA
gatatgacttgtcacaatgtcaccacat

SEQ ID NO: 421 - DNA, 27 bp, synthetic construct
  misc_feature 1..27: note = Synthetic DNA primer, F318
  modified_base 12: mod_base = OTHER; note = uracil
  modified_base 26: mod_base = OTHER; note = uracil
  source 1..27: mol_type = other DNA
gagtgccctattacctcaatcatcctg

SEQ ID NO: 422 - DNA, 31 bp, synthetic construct
  misc_feature 1..31: note = Synthetic DNA primer, F319
  modified_base 15: mod_base = OTHER; note = uracil
  modified_base 29: mod_base = OTHER; note = uracil
  source 1..31: mol_type = other DNA
gatcagttactacctgaaaatgacactttgt

SEQ ID NO: 423 - DNA, 26 bp, synthetic construct
  misc_feature 1..26: note = Synthetic DNA primer, F320
  modified_base 12: mod_base = OTHER; note = uracil
  modified_base 23: mod_base = OTHER; note = uracil
  source 1..26: mol_type = other DNA
gataaagaccttcttccgtgtgtcct

SEQ ID NO: 424 - DNA, 35 bp, synthetic construct
  misc_feature 1..35: note = Synthetic DNA primer, F321
  modified_base 14: mod_base = OTHER; note = uracil
  modified_base 32: mod_base = OTHER; note = uracil
  source 1..35: mol_type = other DNA
gatacatttattttgagaaacttgagagaacttca

SEQ ID NO: 425 - DNA, 33 bp, synthetic construct
  misc_feature 1..33: note = Synthetic DNA primer, F322
  modified_base 16: mod_base = OTHER; note = uracil
  modified_base 32: mod_base = OTHER; note = uracil
  source 1..33: mol_type = other DNA
gaagatggtgatagatctttaagagaattgctt

SEQ ID NO: 426 - DNA, 34 bp, synthetic construct
  misc_feature 1..34: note = Synthetic DNA primer, F323
  modified_base 18: mod_base = OTHER; note = uracil
  modified_base 33: mod_base = OTHER; note = uracil
  source 1..34: mol_type = other DNA
gaagcttttgataagagttaggaaatcactagtc

SEQ ID NO: 427 - DNA, 33 bp, synthetic construct
  misc_feature 1..33: note = Synthetic DNA primer, F324
  modified_base 7: mod_base = OTHER; note = uracil
  modified_base 28: mod_base = OTHER; note = uracil
  source 1..33: mol_type = other DNA
gaaggataaaaaccagcattatttatttgagca

SEQ ID NO: 428 - DNA, 29 bp, synthetic construct
  misc_feature 1..29: note = Synthetic DNA primer, F325
  modified_base 11: mod_base = OTHER; note = uracil
  modified_base 26: mod_base = OTHER; note = uracil
  source 1..29: mol_type = other DNA
gactgacccataatcttgcaccatttacc

SEQ ID NO: 429 - DNA, 29 bp, synthetic construct
  misc_feature 1..29: note = Synthetic DNA primer, F326
  modified_base 14: mod_base = OTHER; note = uracil
  modified_base 27: mod_base = OTHER; note = uracil
  source 1..29: mol_type = other DNA
gatttgaaatgaatgttcacgacaaatgc

SEQ ID NO: 430 - DNA, 31 bp, synthetic construct
  misc_feature 1..31: note = Synthetic DNA primer, F327
  modified_base 16: mod_base = OTHER; note = uracil
  modified_base 30: mod_base = OTHER; note = uracil
  source 1..31: mol_type = other DNA
gaacaaccaaaacaatacacacagagatttt

SEQ ID NO: 431 - DNA, 30 bp, synthetic construct
  misc_feature 1..30: note = Synthetic DNA primer, F328
  modified_base 11: mod_base = OTHER; note = uracil
  modified_base 27: mod_base = OTHER; note = uracil
  source 1..30: mol_type = other DNA
gaacggagggtcatgtgtatattaagtaag

SEQ ID NO: 432 - DNA, 33 bp, synthetic construct
  misc_feature 1..33: note = Synthetic DNA primer, F329
  modified_base 11: mod_base = OTHER; note = uracil
  modified_base 21: mod_base = OTHER; note = uracil
  source 1..33: mol_type = other DNA
gagaattaagtgtgtactactcccaagagaaaa

SEQ ID NO: 433 - DNA, 34 bp, synthetic construct
  misc_feature 1..34: note = Synthetic DNA primer, F330
  modified_base 14: mod_base = OTHER; note = uracil
  modified_base 32: mod_base = OTHER; note = uracil
  source 1..34: mol_type = other DNA
gatataggatgagtagctccaaattaatgaatgt

SEQ ID NO: 434 - DNA, 29 bp, synthetic construct
  misc_feature 1..29: note = Synthetic DNA primer, F331
  modified_base 12: mod_base = OTHER; note = uracil
  modified_base 26: mod_base = OTHER; note = uracil
  source 1..29: mol_type = other DNA
gagctgtagaatagtcaagaggaattgca

SEQ ID NO: 435 - DNA, 26 bp, synthetic construct
  misc_feature 1..26: note = Synthetic DNA primer, F332
  modified_base 11: mod_base = OTHER; note = uracil
  modified_base 25: mod_base = OTHER; note = uracil
  source 1..26: mol_type = other DNA
gactcagtgctctaaatccagagctg

SEQ ID NO: 436 - DNA, 33 bp, synthetic construct
  misc_feature 1..33: note = Synthetic DNA primer, F333
  modified_base 12: mod_base = OTHER; note = uracil
  modified_base 24: mod_base = OTHER; note = uracil
  source 1..33: mol_type = other DNA
gaatgaaatattgtcaactctcttaggcaaaat

SEQ ID NO: 437 - DNA, 29 bp, synthetic construct
  misc_feature 1..29: note = Synthetic DNA primer, F334
  modified_base 8: mod_base = OTHER; note = uracil
  modified_base 21: mod_base = OTHER; note = uracil
  source 1..29: mol_type = other DNA
gatactttgcaaagctgaattagacagca

SEQ ID NO: 438 - DNA, 26 bp, synthetic construct
  misc_feature 1..26: note = Synthetic DNA primer, F335
  modified_base 12: mod_base = OTHER; note = uracil
  modified_base 24: mod_base = OTHER; note = uracil
  source 1..26: mol_type = other DNA
gaacatgagcatcacattttccttgg

SEQ ID NO: 439 - DNA, 29 bp, synthetic construct
  misc_feature 1..29: note = Synthetic DNA primer, F336
  modified_base 14: mod_base = OTHER; note = uracil
  modified_base 25: mod_base = OTHER; note = uracil
  source 1..29: mol_type = other DNA
gatgccttatgaatatattcacgctgact

SEQ ID NO: 440 - RNA, 22 nt, synthetic construct
  misc_feature 1..22: note = Synthetic Primer, F337
  source 1..22: mol_type = other RNA
gaaccaggtaagcaccgaagtc

SEQ ID NO: 441 - DNA, 19 bp, synthetic construct
  misc_feature 1..19: note = Synthetic DNA primer, F338
  modified_base 13: mod_base = OTHER; note = uracil
  modified_base 17: mod_base = OTHER; note = uracil
  source 1..19: mol_type = other DNA
gaaccaagccgctggttca

SEQ ID NO: 442 - DNA, 25 bp, synthetic construct
  misc_feature 1..25: note = Synthetic DNA primer, F339
  modified_base 10: mod_base = OTHER; note = uracil
  modified_base 23: mod_base = OTHER; note = uracil
  source 1..25: mol_type = other DNA
gaagacccctttaactcaagactgc

SEQ ID NO: 443 - DNA, 27 bp, synthetic construct
  misc_feature 1..27: note = Synthetic DNA primer, F340
  modified_base 10: mod_base = OTHER; note = uracil
  modified_base 24: mod_base = OTHER; note = uracil
  source 1..27: mol_type = other DNA
gagcgaggatatctggaagaaattcga

SEQ ID NO: 444 - DNA, 19 bp, synthetic construct
  misc_feature 1..19: note = Synthetic DNA primer, F341
  modified_base 3: mod_base = OTHER; note = uracil
  modified_base 6: mod_base = OTHER; note = uracil
  source 1..19: mol_type = other DNA
gattctccacggccgacca

SEQ ID NO: 445 - DNA, 27 bp, synthetic construct
  misc_feature 1..27: note = Synthetic DNA primer, F342
  modified_base 10: mod_base = OTHER; note = uracil
  modified_base 24: mod_base = OTHER; note = uracil
  source 1..27: mol_type = other DNA
gaaagtccctcaaaaataggaggtgct

SEQ ID NO: 446 - RNA, 27 nt, synthetic construct
  misc_feature 1..27: note = Synthetic Primer, F343
  source 1..27: mol_type = other RNA
gagacagatcagcaacaaccgaaaatg

SEQ ID NO: 447 - DNA, 29 bp, synthetic construct
  misc_feature 1..29: note = Synthetic DNA primer, F344
  modified_base 17: mod_base = OTHER; note = uracil
  modified_base 28: mod_base = OTHER; note = uracil
  source 1..29: mol_type = other DNA
gatttgtccagagacctttctaacgtatt

SEQ ID NO: 448 - DNA, 24 bp, synthetic construct
  misc_feature 1..24: note = Synthetic DNA primer, F345
  modified_base 7: mod_base = OTHER; note = uracil
  modified_base 21: mod_base = OTHER; note = uracil
  source 1..24: mol_type = other DNA
gatttctgaagaggacttgttgcg

SEQ ID NO: 449 - DNA, 32 bp, synthetic construct
  misc_feature 1..32: note = Synthetic DNA primer, F346
  modified_base 9: mod_base = OTHER; note = uracil
  modified_base 22: mod_base = OTHER; note = uracil
  source 1..32: mol_type = other DNA
gagatttttcagttaataatatcccccgagct

SEQ ID NO: 450 - DNA, 19 bp, synthetic construct
  misc_feature 1..19: note = Synthetic DNA primer, F347
  modified_base 10: mod_base = OTHER; note = uracil
  modified_base 16: mod_base = OTHER; note = uracil
  source 1..19: mol_type = other DNA
gaaatcgcctccggatccc

SEQ ID NO: 451 - DNA, 34 bp, synthetic construct
  misc_feature 1..34: note = Synthetic DNA primer, F348
  modified_base 14: mod_base = OTHER; note = uracil
  modified_base 30: mod_base = OTHER; note = uracil
  source 1..34: mol_type = other DNA
gagtcattccttctttttaaaatggtgcttaagt

SEQ ID NO: 452 - DNA, 22 bp, synthetic construct
  misc_feature 1..22: note = Synthetic DNA primer, F349
  modified_base 14: mod_base = OTHER; note = uracil
  modified_base 21: mod_base = OTHER; note = uracil
  source 1..22: mol_type = other DNA
gaggtcccccacctctcttttg

SEQ ID NO: 453 - DNA, 23 bp, synthetic construct
  misc_feature 1..23: note = Synthetic DNA primer, F350
  modified_base 6: mod_base = OTHER; note = uracil
  modified_base 22: mod_base = OTHER; note = uracil
  source 1..23: mol_type = other DNA
gactctccaggaaggctcacatc

SEQ ID NO: 454 - DNA, 21 bp, synthetic construct
  misc_feature 1..21: note = Synthetic DNA primer, F351
  modified_base 9: mod_base = OTHER; note = uracil
  modified_base 20: mod_base = OTHER; note = uracil
  source 1..21: mol_type = other DNA
gatggcattgccttgtccttg

SEQ ID NO: 455 - DNA, 27 bp, synthetic construct
  misc_feature 1..27: note = Synthetic DNA primer, F352
  modified_base 20: mod_base = OTHER; note = uracil
  modified_base 26: mod_base = OTHER; note = uracil
  source 1..27: mol_type = other DNA
gaggcagaaaaccaaaacattggctta

SEQ ID NO: 456 - DNA, 35 bp, synthetic construct
  misc_feature 1..35: note = Synthetic DNA primer, F353
  modified_base 17: mod_base = OTHER; note = uracil
  modified_base 31: mod_base = OTHER; note = uracil
  source 1..35: mol_type = other DNA
gaaattgttcctcaagtttgtttaaggacttaaaa

SEQ ID NO: 457 - DNA, 29 bp, synthetic construct
  misc_feature 1..29: note = Synthetic DNA primer, F354
  modified_base 13: mod_base = OTHER; note = uracil
  modified_base 28: mod_base = OTHER; note = uracil
  source 1..29: mol_type = other DNA
gaagtggtatcatccccatttaatagctg

SEQ ID NO: 458 - DNA, 32 bp, synthetic construct
  misc_feature 1..32: note = Synthetic DNA primer, F355
  modified_base 16: mod_base = OTHER; note = uracil
  modified_base 31: mod_base = OTHER; note = uracil
  source 1..32: mol_type = other DNA
gaacaaatacaaaactgtccacatctatgttg

SEQ ID NO: 459 - DNA, 34 bp, synthetic construct
  misc_feature 1..34: note = Synthetic DNA primer, F356
  modified_base 16: mod_base = OTHER; note = uracil
  modified_base 33: mod_base = OTHER; note = uracil
  source 1..34: mol_type = other DNA
gaaacaaaccatagctataatgaagaacttgcta

SEQ ID NO: 460 - DNA, 34 bp, synthetic construct
  misc_feature 1..34: note = Synthetic DNA primer, F257
  modified_base 15: mod_base = OTHER; note = uracil
  modified_base 30: mod_base = OTHER; note = uracil
  source 1..34: mol_type = other DNA
gaaatagttgatcatactttgtaacagaatcaca

SEQ ID NO: 461 - DNA, 32 bp, synthetic construct
  misc_feature 1..32: note = Synthetic DNA primer, F358
  modified_base 14: mod_base = OTHER; note = uracil
  modified_base 31: mod_base = OTHER; note = uracil
  source 1..32: mol_type = other DNA
gactcatctccctttaattttggcacattatt

SEQ ID NO: 462 - DNA, 31 bp, synthetic construct
  misc_feature 1..31: note = Synthetic DNA primer, F359
  modified_base 11: mod_base = OTHER; note = uracil
  modified_base 23: mod_base = OTHER; note = uracil
  source 1..31: mol_type = other DNA
gaaactatcttctttggacttctgaagagac

SEQ ID NO: 463 - DNA, 34 bp, synthetic construct
  misc_feature 1..34: note = Synthetic DNA primer, F360
  modified_base 17: mod_base = OTHER; note = uracil
  modified_base 33: mod_base = OTHER; note = uracil
  source 1..34: mol_type = other DNA
gaagtaaataatggtttctccttctcttactttg

SEQ ID NO: 464 - DNA, 26 bp, synthetic construct
  misc_feature 1..26: note = Synthetic DNA primer, F361
  modified_base 10: mod_base = OTHER; note = uracil
  modified_base 20: mod_base = OTHER; note = uracil
  source 1..26: mol_type = other DNA
gattcctggtggcattcaataaagca

SEQ ID NO: 465 - DNA, 24 bp, synthetic construct
  misc_feature 1..24: note = Synthetic DNA primer, F362
  modified_base 12: mod_base = OTHER; note = uracil
  modified_base 21: mod_base = OTHER; note = uracil
  source 1..24: mol_type = other DNA
gaaggagcaacttagggatctggt

SEQ ID NO: 466 - DNA, 23 bp, synthetic construct
  misc_feature 1..23: note = Synthetic DNA primer, F363
  modified_base 11: mod_base = OTHER; note = uracil
  modified_base 22: mod_base = OTHER; note = uracil
  source 1..23: mol_type = other DNA
gaacccctaatctggtcaacctg

SEQ ID NO: 467 - DNA, 32 bp, synthetic construct
  misc_feature 1..32: note = Synthetic DNA primer, F364
  modified_base 16: mod_base = OTHER; note = uracil
  modified_base 28: mod_base = OTHER; note = uracil
  source 1..32: mol_type = other DNA
gaagaaatagaaaactacaggacgttatccag

SEQ ID NO: 468 - DNA, 27 bp, synthetic construct
  misc_feature 1..27: note = Synthetic DNA primer, F365
  modified_base 12: mod_base = OTHER; note = uracil
  modified_base 26: mod_base = OTHER; note = uracil
  source 1..27: mol_type = other DNA
gatccgctttctaaaatgtcagttgtc

SEQ ID NO: 469 - RNA, 22 nt, synthetic construct
  misc_feature 1..22: note = Synthetic Primer, R97
  source 1..22: mol_type = other RNA
gaggcaggagaccctgtaggag

SEQ ID NO: 470 - DNA, 26 bp, synthetic construct
  misc_feature 1..26: note = Synthetic DNA primer, R98
  modified_base 8: mod_base = OTHER; note = uracil
  modified_base 15: mod_base = OTHER; note = uracil
  source 1..26: mol_type = other DNA
gaggatatatgccataccccagcaaa

SEQ ID NO: 471 - DNA, 29 bp, synthetic construct
  misc_feature 1..29: note = Synthetic DNA primer, R99
  modified_base 14: mod_base = OTHER; note = uracil
  modified_base 28: mod_base = OTHER; note = uracil
  source 1..29: mol_type = other DNA
gaccaagaaaggcttgtgtctacattttt

SEQ ID NO: 472 - DNA, 29 bp, synthetic construct
  misc_feature 1..29: note = Synthetic DNA primer, R100
  modified_base 8: mod_base = OTHER; note = uracil
  modified_base 22: mod_base = OTHER; note = uracil
  source 1..29: mol_type = other DNA
gaccaaatcaagaaacctgtttgagagaa

SEQ ID NO: 473 - DNA, 25 bp, synthetic construct
  misc_feature 1..25: note = Synthetic DNA primer, R101
  modified_base 11: mod_base = OTHER; note = uracil
  modified_base 22: mod_base = OTHER; note = uracil
  source 1..25: mol_type = other DNA
gacacttcccttgtgggaatgtcaa

SEQ ID NO: 474 - DNA, 25 bp, synthetic construct
  misc_feature 1..25: note = Synthetic DNA primer, R102
  modified_base 16: mod_base = OTHER; note = uracil
  modified_base 24: mod_base = OTHER; note = uracil
  source 1..25: mol_type = other DNA
gatgcatcagaaccctccttgaatc

SEQ ID NO: 475 - RNA, 24 nt, synthetic construct
  misc_feature 1..24: note = Synthetic Primer, R103
  source 1..24: mol_type = other RNA
gaggtccacggatccagaaacaag

SEQ ID NO: 476 - DNA, 23 bp, synthetic construct
  misc_feature 1..23: note = Synthetic DNA primer, R104
  modified_base 12: mod_base = OTHER; note = uracil
  modified_base 22: mod_base = OTHER; note = uracil
  source 1..23: mol_type = other DNA
gaggttcctcctctcctggtctc

SEQ ID NO: 477 - DNA, 29 bp, synthetic construct
  misc_feature 1..29: note = Synthetic DNA primer, R105
  modified_base 13: mod_base = OTHER; note = uracil
  modified_base 27: mod_base = OTHER; note = uracil
  source 1..29: mol_type = other DNA
gagctcactaactaacgtgaaagccttac

SEQ ID NO: 478 - DNA, 29 bp, synthetic construct
  misc_feature 1..29: note = Synthetic DNA primer, R106
  modified_base 16: mod_base = OTHER; note = uracil
  modified_base 28: mod_base = OTHER; note = uracil
  source 1..29: mol_type = other DNA
gaggttttgcacaagttaggtttgttttg

SEQ ID NO: 479 - DNA, 35 bp, synthetic construct
  misc_feature 1..35: note = Synthetic DNA primer, R107
  modified_base 16: mod_base = OTHER; note = uracil
  modified_base 33: mod_base = OTHER; note = uracil
  source 1..35: mol_type = other DNA
gaacctttatatcgttactctgaatcttatcttcc

SEQ ID NO: 480 - DNA, 27 bp, synthetic construct
  misc_feature 1..27: note = Synthetic DNA primer, R108
  modified_base 13: mod_base = OTHER; note = uracil
  modified_base 26: mod_base = OTHER; note = uracil
  source 1..27: mol_type = other DNA
gatgactctgtctcctcttgtcttctc

SEQ ID NO: 481 - DNA, 28 bp, synthetic construct
  misc_feature 1..28: note = Synthetic DNA primer, R109
  modified_base 12: mod_base = OTHER; note = uracil
  modified_base 26: mod_base = OTHER; note = uracil
  source 1..28: mol_type = other DNA
gaaaacgtttttcaccttagcattttgt

SEQ ID NO: 482 - DNA, 30 bp, synthetic construct
  misc_feature 1..30: note = Synthetic DNA primer, R110
  modified_base 10: mod_base = OTHER; note = uracil
  modified_base 20: mod_base = OTHER; note = uracil
  source 1..30: mol_type = other DNA
gacaccatctccatatcattgagaccaaat

SEQ ID NO: 483 - DNA, 29 bp, synthetic construct
  misc_feature 1..29: note = Synthetic DNA primer, R111
  modified_base 11: mod_base = OTHER; note = uracil
  modified_base 27: mod_base = OTHER; note = uracil
  source 1..29: mol_type = other DNA
gacgacagactactttggttctcttttgt

SEQ ID NO: 484 - DNA, 22 bp, synthetic construct
  misc_feature 1..22: note = Synthetic DNA primer, R112
  modified_base 8: mod_base = OTHER; note = uracil
  modified_base 19: mod_base = OTHER; note = uracil
  source 1..22: mol_type = other DNA
gactcactgacaagctcctcgt

SEQ ID NO: 485 - DNA, 26 bp, synthetic construct
  misc_feature 1..26: note = Synthetic DNA primer, R113
  modified_base 13: mod_base = OTHER; note = uracil
  modified_base 25: mod_base = OTHER; note = uracil
  source 1..26: mol_type = other DNA
gagccttttcttttgcttcccttgtt

SEQ ID NO: 486 - RNA, 19 nt, synthetic construct
  misc_feature 1..19: note = Synthetic Primer, R114
  source 1..19: mol_type = other RNA
gacaggacctggccctgac

SEQ ID NO: 487 - DNA, 25 bp, synthetic construct
  misc_feature 1..25: note = Synthetic DNA primer, R115
  modified_base 7: mod_base = OTHER; note = uracil
  modified_base 21: mod_base = OTHER; note = uracil
  source 1..25: mol_type = other DNA
gacccatcacacaccataactccac

SEQ ID NO: 488 - DNA, 22 bp, synthetic construct
  misc_feature 1..22: note = Synthetic DNA primer, R116
  modified_base 7: mod_base = OTHER; note = uracil
  modified_base 19: mod_base = OTHER; note = uracil
  source 1..22: mol_type = other DNA
gagctgtcccctcaccattcag

SEQ ID NO: 489 - DNA, 30 bp, synthetic construct
  misc_feature 1..30: note = Synthetic DNA primer, R117
  modified_base 14: mod_base = OTHER; note = uracil
  modified_base 27: mod_base = OTHER; note = uracil
  source 1..30: mol_type = other DNA
gatcacaacccactgaggtatatgtatagg

SEQ ID NO: 490 - RNA, 22 nt, synthetic construct
  misc_feature 1..22: note = Synthetic Primer, R118
  source 1..22: mol_type = other RNA
gacatgcaccggaaaagcgatg

SEQ ID NO: 491 - DNA, 26 bp, synthetic construct
  misc_feature 1..26: note = Synthetic DNA primer, R119
  modified_base 13: mod_base = OTHER; note = uracil
  modified_base 22: mod_base = OTHER; note = uracil
  source 1..26: mol_type = other DNA
gacatttctaggttacaggcctggat

SEQ ID NO: 492 - DNA, 20 bp, synthetic construct
  misc_feature 1..20: note = Synthetic DNA primer, R120
  modified_base 8: mod_base = OTHER; note = uracil
  modified_base 18: mod_base = OTHER; note = uracil
  source 1..20: mol_type = other DNA
gactccatgcccctcactca

SEQ ID NO: 493 - DNA, 26 bp, synthetic construct
  misc_feature 1..26: note = Synthetic DNA primer, R121
  modified_base 13: mod_base = OTHER; note = uracil
  modified_base 22: mod_base = OTHER; note = uracil
  source 1..26: mol_type = other DNA
gaattgaaaatcttcctgccttccct

SEQ ID NO: 494 - DNA, 26 bp, synthetic construct
  misc_feature 1..26: note = Synthetic DNA primer, R122
  modified_base 13: mod_base = OTHER; note = uracil
  modified_base 24: mod_base = OTHER; note = uracil
  source 1..26: mol_type = other DNA
gagcaaaagtggtcctctctgaatct

SEQ ID NO: 495 - DNA, 26 bp, synthetic construct
  misc_feature 1..26: note = Synthetic DNA primer, R123
  modified_base 9: mod_base = OTHER; note = uracil
  modified_base 24: mod_base = OTHER; note = uracil
  source 1..26: mol_type = other DNA
gaatatcatccagcctgtgtctttcc

SEQ ID NO: 496 - DNA, 24 bp, synthetic construct
  misc_feature 1..24: note = Synthetic DNA primer, R124
  modified_base 17: mod_base = OTHER; note = uracil
  modified_base 21: mod_base = OTHER; note = uracil
  source 1..24: mol_type = other DNA
gagagggaaggcaggatctctaac

SEQ ID NO: 497 - DNA, 25 bp, synthetic construct
  misc_feature 1..25: note = Synthetic DNA primer, R125
  modified_base 11: mod_base = OTHER; note = uracil
  modified_base 24: mod_base = OTHER; note = uracil
  source 1..25: mol_type = other DNA
gaccaggcaatggaaagggtacata

SEQ ID NO: 498 - DNA, 27 bp, synthetic construct
  misc_feature 1..27: note = Synthetic DNA primer, R126
  modified_base 6: mod_base = OTHER; note = uracil
  modified_base 21: mod_base = OTHER; note = uracil
  source 1..27: mol_type = other DNA
gagaataaagaggagcaggttgaggaa

SEQ ID NO: 499 - DNA, 22 bp, synthetic construct
  misc_feature 1..22: note = Synthetic DNA primer, R127
  modified_base 10: mod_base = OTHER; note = uracil
  modified_base 18: mod_base = OTHER; note = uracil
  source 1..22: mol_type = other DNA
gagggcaaatgagcctctcagt

SEQ ID NO: 500 - DNA, 29 bp, synthetic construct
  misc_feature 1..29: note = Synthetic DNA primer, R128
  modified_base 13: mod_base = OTHER; note = uracil
  modified_base 24: mod_base = OTHER; note = uracil
  source 1..29: mol_type = other DNA
gatccagattgatcttgggagtgtaaaaa

SEQ ID NO: 501 - DNA, 25 bp, synthetic construct
  misc_feature 1..25: note = Synthetic DNA primer, R129
  modified_base 12: mod_base = OTHER; note = uracil
  modified_base 22: mod_base = OTHER; note = uracil
  source 1..25: mol_type = other DNA
gagtctttgtgttcccggacatagt

SEQ ID NO: 502 - DNA, 22 bp, synthetic construct
  misc_feature 1..22: note = Synthetic DNA primer, R130
  modified_base 8: mod_base = OTHER; note = uracil
  modified_base 20: mod_base = OTHER; note = uracil
  source 1..22: mol_type = other DNA
gagggtctgacgggtagagtgt

SEQ ID NO: 503 - DNA, 30 bp, synthetic construct
  misc_feature 1..30: note = Synthetic DNA primer, R131
  modified_base 14: mod_base = OTHER; note = uracil
  modified_base 29: mod_base = OTHER; note = uracil
  source 1..30: mol_type = other DNA
gagcttgctctgataggaaaatgagatcta

SEQ ID NO: 504 - DNA, 24 bp, synthetic construct
  misc_feature 1..24: note = Synthetic DNA primer, R132
  modified_base 11: mod_base = OTHER; note = uracil
  modified_base 23: mod_base = OTHER; note = uracil
  source 1..24: mol_type = other DNA
gacctcttcctcaggattgccttt

SEQ ID NO: 505 - DNA, 30 bp, synthetic construct
  misc_feature 1..30: note = Synthetic DNA primer, R133
  modified_base 13: mod_base = OTHER; note = uracil
  modified_base 29: mod_base = OTHER; note = uracil
  source 1..30: mol_type = other DNA
gatcagtccggttttatttgcatcatagtt

SEQ ID NO: 506 - DNA, 27 bp, synthetic construct
  misc_feature 1..27: note = Synthetic DNA primer, R134
  modified_base 12: mod_base = OTHER; note = uracil
  modified_base 26: mod_base = OTHER; note = uracil
  source 1..27: mol_type = other DNA
gacccaaagactctccaagatgggata

SEQ ID NO: 507 - DNA, 24 bp, synthetic construct
  misc_feature 1..24: note = Synthetic DNA primer, R135
  modified_base 15: mod_base = OTHER; note = uracil
  modified_base 23: mod_base = OTHER; note = uracil
  source 1..24: mol_type = other DNA
gatccagaccagggtgttgttttc

SEQ ID NO: 508 - DNA, 25 bp, synthetic construct
  misc_feature 1..25: note = Synthetic DNA primer, R136
  modified_base 15: mod_base = OTHER; note = uracil
  modified_base 23: mod_base = OTHER; note = uracil
  source 1..25: mol_type = other DNA
gagtgccagggaccttaccttatac

SEQ ID NO: 509 - DNA, 22 bp, synthetic construct
  misc_feature 1..22: note = Synthetic DNA primer, R137
  modified_base 9: mod_base = OTHER; note = uracil
  modified_base 19: mod_base = OTHER; note = uracil
  source 1..22: mol_type = other DNA
gactgaggttcagagccatgga

SEQ ID NO: 510 - DNA, 25 bp, synthetic construct
  misc_feature 1..25: note = Synthetic DNA primer, R138
  modified_base 4: mod_base = OTHER; note = uracil
  modified_base 11: mod_base = OTHER; note = uracil
  source 1..25: mol_type = other DNA
gagtcatatctccccaaaccccaat

SEQ ID NO: 511 - DNA, 24 bp, synthetic construct
  misc_feature 1..24: note = Synthetic DNA primer, R139
  modified_base 14: mod_base = OTHER; note = uracil
  modified_base 23: mod_base = OTHER; note = uracil
  source 1..24: mol_type = other DNA
gagccatagggcataagctgtgtc

SEQ ID NO: 512 - DNA, 25 bp, synthetic construct
  misc_feature 1..25: note = Synthetic DNA primer, R140
  modified_base 12: mod_base = OTHER; note = uracil
  modified_base 24: mod_base = OTHER; note = uracil
  source 1..25: mol_type = other DNA
gaccttggtccttcacctaaccttg

SEQ ID NO: 513 - DNA, 23 bp, synthetic construct
  misc_feature 1..23: note = Synthetic DNA primer, R141
  modified_base 8: mod_base = OTHER; note = uracil
  modified_base 16: mod_base = OTHER; note = uracil
  source 1..23: mol_type = other DNA
gaccctctttagccatggcaagg

SEQ ID NO: 514 - DNA, 24 bp, synthetic construct
  misc_feature 1..24: note = Synthetic DNA primer, R142
  modified_base 10: mod_base = OTHER; note = uracil
  modified_base 21: mod_base = OTHER; note = uracil
  source 1..24: mol_type = other DNA
gatggtctctcattctcccatccc

SEQ ID NO: 515 - DNA, 24 bp, synthetic construct
  misc_feature 1..24: note = Synthetic DNA primer, R143
  modified_base 10: mod_base = OTHER; note = uracil
  modified_base 22: mod_base = OTHER; note = uracil
  source 1..24: mol_type = other DNA
gactcctcctgtgatctgcaatct

SEQ ID NO: 516 - DNA, 30 bp, synthetic construct
  misc_feature 1..30: note = Synthetic DNA primer, R144
  modified_base 8: mod_base = OTHER; note = uracil
  modified_base 18: mod_base = OTHER; note = uracil
  source 1..30: mol_type = other DNA
gagatgatgaagatgattgggaaacacaag

SEQ ID NO: 517 - DNA, 20 bp, synthetic construct
  misc_feature 1..20: note = Synthetic DNA primer, R145
  modified_base 9: mod_base = OTHER; note = uracil
  modified_base 19: mod_base = OTHER; note = uracil
  source 1..20: mol_type = other DNA
gagggctgtgcgtcactgta

SEQ ID NO: 518 - DNA, 20 bp, synthetic construct
  misc_feature 1..20: note = Synthetic DNA primer, R146
  modified_base 15: mod_base = OTHER; note = uracil
  modified_base 19: mod_base = OTHER; note = uracil
  source 1..20: mol_type = other DNA
gaggagcccaggcctttctt

SEQ ID NO: 519 - DNA, 21 bp, synthetic construct
  misc_feature 1..21: note = Synthetic DNA primer, R147
  modified_base 9: mod_base = OTHER; note = uracil
  modified_base 17: mod_base = OTHER; note = uracil
  source 1..21: mol_type = other DNA
gagcgtcctactggcatgacc

SEQ ID NO: 520 - DNA, 21 bp, synthetic construct
  misc_feature 1..21: note = Synthetic DNA primer, R148
  modified_base 7: mod_base = OTHER; note = uracil
  modified_base 19: mod_base = OTHER; note = uracil
  source 1..21: mol_type = other DNA
gaccactcacaggtcgtgtgt

SEQ ID NO: 521 - DNA, 27 bp, synthetic construct
  misc_feature 1..27: note = Synthetic DNA primer, R149
  modified_base 13: mod_base = OTHER; note = uracil
  modified_base 23: mod_base = OTHER; note = uracil
  source 1..27: mol_type = other DNA
gaacatgatggatgtcacgttctcaaa

SEQ ID NO: 522 - DNA, 26 bp, synthetic construct
  misc_feature 1..26: note = Synthetic DNA primer, R150
  modified_base 11: mod_base = OTHER; note = uracil
  modified_base 22: mod_base = OTHER; note = uracil
  source 1..26: mol_type = other DNA
gatgttaaccttgcagaatggtcgat

SEQ ID NO: 523 - DNA, 22 bp, synthetic construct
  misc_feature 1..22: note = Synthetic DNA primer, R151
  modified_base 4: mod_base = OTHER; note = uracil
  modified_base 15: mod_base = OTHER; note = uracil
  source 1..22: mol_type = other DNA
gactgcaggattcctaccggaa

SEQ ID NO: 524 - DNA, 24 bp, synthetic construct
  misc_feature 1..24: note = Synthetic DNA primer, R152
  modified_base 12: mod_base = OTHER; note = uracil
  modified_base 20: mod_base = OTHER; note = uracil
  source 1..24: mol_type = other DNA
gaatcaccaaatggcaccatacga

SEQ ID NO: 525 - DNA, 27 bp, synthetic construct
  misc_feature 1..27: note = Synthetic DNA primer, R153
  modified_base 12: mod_base = OTHER; note = uracil
  modified_base 23: mod_base = OTHER; note = uracil
  source 1..27: mol_type = other DNA
gaagttcaagctgaagaagatgtggaa

SEQ ID NO: 526 - DNA, 24 bp, synthetic construct
  misc_feature 1..24: note = Synthetic DNA primer, R154
  modified_base 11: mod_base = OTHER; note = uracil
  modified_base 23: mod_base = OTHER; note = uracil
  source 1..24: mol_type = other DNA
gactgacacctagctgtgatcctg

SEQ ID NO: 527 - DNA, 30 bp, synthetic construct
  misc_feature 1..30: note = Synthetic DNA primer, R155
  modified_base 13: mod_base = OTHER; note = uracil
  modified_base 24: mod_base = OTHER; note = uracil
  source 1..30: mol_type = other DNA
gaactgatatggtagacagagcctaaacat

SEQ ID NO: 528 - DNA, 26 bp, synthetic construct
  misc_feature 1..26: note = Synthetic DNA primer, R156
  modified_base 13: mod_base = OTHER; note = uracil
  modified_base 24: mod_base = OTHER; note = uracil
  source 1..26: mol_type = other DNA
gagtctcagtcattagagcactctgg

SEQ ID NO: 529 - DNA, 27 bp, synthetic construct
  misc_feature 1..27: note = Synthetic DNA primer, R157
  modified_base 11: mod_base = OTHER; note = uracil
  modified_base 21: mod_base = OTHER; note = uracil
  source 1..27: mol_type = other DNA
gatttcatactgaccaaaactcagcct

SEQ ID NO: 530 - DNA, 23 bp, synthetic construct
  misc_feature 1..23: note = Synthetic DNA primer, R158
  modified_base 11: mod_base = OTHER; note = uracil
  modified_base 22: mod_base = OTHER; note = uracil
  source 1..23: mol_type = other DNA
gagacacggctttacctccaatg

SEQ ID NO: 531 - DNA, 29 bp, synthetic construct
  misc_feature 1..29: note = Synthetic DNA primer, R159
  modified_base 11: mod_base = OTHER; note = uracil
  modified_base 27: mod_base = OTHER; note = uracil
  source 1..29: mol_type = other DNA
gaaggcctgctgaaaatgactgaatataa

SEQ ID NO: 532 - DNA, 31 bp, synthetic construct
  misc_feature 1..31: note = Synthetic DNA primer, R160
  modified_base 11: mod_base = OTHER; note = uracil
  modified_base 24: mod_base = OTHER; note = uracil
  source 1..31: mol_type = other DNA
gagtaaaaggtgcactgtaataatccagact

SEQ ID NO: 533 - DNA, 29 bp, synthetic construct
  misc_feature 1..29: note = Synthetic DNA primer, R161
  modified_base 14: mod_base = OTHER; note = uracil
  modified_base 28: mod_base = OTHER; note = uracil
  source 1..29: mol_type = other DNA
gagactctgaagatgtacctatggtccta

SEQ ID NO: 534 - DNA, 29 bp, synthetic construct
  misc_feature 1..29: note = Synthetic DNA primer, R162
  modified_base 8: mod_base = OTHER; note = uracil
  modified_base 18: mod_base = OTHER; note = uracil
  source 1..29: mol_type = other DNA
gagcttttcaaaaggcttaaacacaggat

SEQ ID NO: 535 - DNA, 29 bp, synthetic construct
  misc_feature 1..29: note = Synthetic DNA primer, R163
  modified_base 17: mod_base = OTHER; note = uracil
  modified_base 26: mod_base = OTHER; note = uracil
  source 1..29: mol_type = other DNA
gagcaaaccacaaaagtatactccatggt

SEQ ID NO: 536 - DNA, 29 bp, synthetic construct
  misc_feature 1..29: note = Synthetic DNA primer, R164
  modified_base 13: mod_base = OTHER; note = uracil
  modified_base 28: mod_base = OTHER; note = uracil
  source 1..29: mol_type = other DNA
gatctgacttggtggtaaacttttgagtt

SEQ ID NO: 537 - DNA, 26 bp, synthetic construct
  misc_feature 1..26: note = Synthetic DNA primer, R165
  modified_base 11: mod_base = OTHER; note = uracil
  modified_base 25: mod_base = OTHER; note = uracil
  source 1..26: mol_type = other DNA
gagttcttgctggtgtgaaatgactg

SEQ ID NO: 538 - DNA, 26 bp, synthetic construct
  misc_feature 1..26: note = Synthetic DNA primer, R166
  modified_base 14: mod_base = OTHER; note = uracil
  modified_base 18: mod_base = OTHER; note = uracil
  source 1..26: mol_type = other DNA
gacacccccaggattcttacagaaaa

SEQ ID NO: 539 - DNA, 27 bp, synthetic construct
  misc_feature 1..27: note = Synthetic DNA primer, R167
  modified_base 10: mod_base = OTHER; note = uracil
  modified_base 25: mod_base = OTHER; note = uracil
  source 1..27: mol_type = other DNA
gacatctcttggaaactcccatcttga

SEQ ID NO: 540 - DNA, 26 bp, synthetic construct
  misc_feature 1..26: note = Synthetic DNA primer, R168
  modified_base 10: mod_base = OTHER; note = uracil
  modified_base 23: mod_base = OTHER; note = uracil
  source 1..26: mol_type = other DNA
gaccacatgtgtccagtgaaaatcct

SEQ ID NO: 541 - DNA, 23 bp, synthetic construct
  misc_feature 1..23: note = Synthetic DNA primer, R169
  modified_base 15: mod_base = OTHER; note = uracil
  modified_base 21: mod_base = OTHER; note = uracil
  source 1..23: mol_type = other DNA
gaagtgaaggaggatgagcctga

SEQ ID NO: 542 - DNA, 30 bp, synthetic construct
  misc_feature 1..30: note = Synthetic DNA primer, R170
  modified_base 16: mod_base = OTHER; note = uracil
  modified_base 29: mod_base = OTHER; note = uracil
  source 1..30: mol_type = other DNA
gagtggaagatccaatccatttttgttgtc

SEQ ID NO: 543 - DNA, 30 bp, synthetic construct
  misc_feature 1..30: note = Synthetic DNA primer, R171
  modified_base 13: mod_base = OTHER; note = uracil
  modified_base 28: mod_base = OTHER; note = uracil
  source 1..30: mol_type = other DNA
gaagcatcagcatttgactttaccttatca

SEQ ID NO: 544 - DNA, 29 bp, synthetic construct
  misc_feature 1..29: note = Synthetic DNA primer, R172
  modified_base 17: mod_base = OTHER; note = uracil
  modified_base 28: mod_base = OTHER; note = uracil
  source 1..29: mol_type = other DNA
gacataagagagaaggtttgactgccata

SEQ ID NO: 545 - DNA, 28 bp, synthetic construct
  misc_feature 1..28: note = Synthetic DNA primer, R173
  modified_base 13: mod_base = OTHER; note = uracil
  modified_base 26: mod_base = OTHER; note = uracil
  source 1..28: mol_type = other DNA
gaagaaaaccattacttgtccatcgtct

SEQ ID NO: 546 - DNA, 23 bp, synthetic construct
  misc_feature 1..23: note = Synthetic DNA primer, R174
  modified_base 9: mod_base = OTHER; note = uracil
  modified_base 21: mod_base = OTHER; note = uracil
  source 1..23: mol_type = other DNA
gaccttgttgggacctcagatgt

SEQ ID NO: 547 - DNA, 23 bp, synthetic construct
  misc_feature 1..23: note = Synthetic DNA primer, R175
  modified_base 7: mod_base = OTHER; note = uracil
  modified_base 17: mod_base = OTHER; note = uracil
  source 1..23: mol_type = other DNA
gagtggtagcagtggatgcagaa

SEQ ID NO: 548 - DNA, 25 bp, synthetic construct
  misc_feature 1..25: note = Synthetic DNA primer, R176
  modified_base 11: mod_base = OTHER; note = uracil
  modified_base 21: mod_base = OTHER; note = uracil
  source 1..25: mol_type = other DNA
gaaggccccatacaatttgatgaca

SEQ ID NO: 549 - DNA, 20 bp, synthetic construct
  misc_feature 1..20: note = Synthetic DNA primer, R177
  modified_base 9: mod_base = OTHER; note = uracil
  modified_base 15: mod_base = OTHER; note = uracil
  source 1..20: mol_type = other DNA
gaccatggtgcacctgggat

SEQ ID NO: 550 - DNA, 28 bp, synthetic construct
  misc_feature 1..28: note = Synthetic DNA primer, R178
  modified_base 11: mod_base = OTHER; note = uracil
  modified_base 25: mod_base = OTHER; note = uracil
  source 1..28: mol_type = other DNA
gaactttgcgtggtgtagatatgatcaa

SEQ ID NO: 551 - DNA, 23 bp, synthetic construct
  misc_feature 1..23: note = Synthetic DNA primer, R179
  modified_base 11: mod_base = OTHER; note = uracil
  modified_base 21: mod_base = OTHER; note = uracil
  source 1..23: mol_type = other DNA
gagtcttcactcacctcggatga

SEQ ID NO: 552 - DNA, 22 bp, synthetic construct
  misc_feature 1..22: note = Synthetic DNA primer, R180
  modified_base 7: mod_base = OTHER; note = uracil
  modified_base 19: mod_base = OTHER; note = uracil
  source 1..22: mol_type = other DNA
gacaggtacgcctccagatgag

SEQ ID NO: 553 - DNA, 21 bp, synthetic construct
  misc_feature 1..21: note = Synthetic DNA primer, R181
  modified_base 6: mod_base = OTHER; note = uracil
  modified_base 17: mod_base = OTHER; note = uracil
  source 1..21: mol_type = other DNA
gaaactcccgcaggtttccct

SEQ ID NO: 554 - DNA, 22 bp, synthetic construct
  misc_feature 1..22: note = Synthetic DNA primer, R182
  modified_base 9: mod_base = OTHER; note = uracil
  modified_base 20: mod_base = OTHER; note = uracil
  source 1..22: mol_type = other DNA
gagtgccttgccctttttgtgg

SEQ ID NO: 555 - RNA, 20 nt, synthetic construct
  misc_feature 1..20: note = Synthetic Primer, R183
  source 1..20: mol_type = other RNA
gaccgggatgccaggatacg

SEQ ID NO: 556 - DNA, 22 bp, synthetic construct
  misc_feature 1..22: note = Synthetic DNA primer, R184
  modified_base 7: mod_base = OTHER; note = uracil
  modified_base 16: mod_base = OTHER; note = uracil
  source 1..22: mol_type = other DNA
gagggctgtacctcctcagaga

SEQ ID NO: 557 - RNA, 21 nt, synthetic construct
  misc_feature 1..21: note = Synthetic Primer, R185
  source 1..21: mol_type = other RNA
gaacaggctgcccaagggcta

SEQ ID NO: 558 - DNA, 23 bp, synthetic construct
  misc_feature 1..23: note = Synthetic DNA primer, R186
  modified_base 6: mod_base = OTHER; note = uracil
  modified_base 14: mod_base = OTHER; note = uracil
  source 1..23: mol_type = other DNA
gacagtgatcagatgagcagcag

SEQ ID NO: 559 - DNA, 22 bp, synthetic construct
  misc_feature 1..22: note = Synthetic DNA primer, R187
  modified_base 7: mod_base = OTHER; note = uracil
  modified_base 10: mod_base = OTHER; note = uracil
  source 1..22: mol_type = other DNA
gaacggtcttggaacccagaga

SEQ ID NO: 560 - DNA, 24 bp, synthetic construct
  misc_feature 1..24: note = Synthetic DNA primer, R188
  modified_base 11: mod_base = OTHER; note = uracil
  modified_base 22: mod_base = OTHER; note = uracil
  source 1..24: mol_type = other DNA
gagctattgatgtctgcagtctgg

SEQ ID NO: 561 - DNA, 22 bp, synthetic construct
  misc_feature 1..22: note = Synthetic DNA primer, R189
  modified_base 4: mod_base = OTHER; note = uracil
  modified_base 9: mod_base = OTHER; note = uracil
  source 1..22: mol_type = other DNA
gattgacttgccggaagagcct

SEQ ID NO: 562 - DNA, 22 bp, synthetic construct
  misc_feature 1..22: note = Synthetic DNA primer, R190
  modified_base 8: mod_base = OTHER; note = uracil
  modified_base 21: mod_base = OTHER; note = uracil
  source 1..22: mol_type = other DNA
gaagacctccgagtcactcctg

SEQ ID NO: 563 - DNA, 28 bp, synthetic construct
  misc_feature 1..28: note = Synthetic DNA primer, R191
  modified_base 15: mod_base = OTHER; note = uracil
  modified_base 26: mod_base = OTHER; note = uracil
  source 1..28: mol_type = other DNA
gaaaaagactcggatgatgtacctatgg

SEQ ID NO: 564 - DNA, 26 bp, synthetic construct
  misc_feature 1..26: note = Synthetic DNA primer, R192
  modified_base 12: mod_base = OTHER; note = uracil
  modified_base 24: mod_base = OTHER; note = uracil
  source 1..26: mol_type = other DNA
gattcctttcttcccagagacattgc

SEQ ID NO: 565 - DNA, 22 bp, synthetic construct
  misc_feature 1..22: note = Synthetic DNA primer, R193
  modified_base 10: mod_base = OTHER; note = uracil
  modified_base 19: mod_base = OTHER; note = uracil
  source 1..22: mol_type = other DNA
gaacatccctctctgctctgca

SEQ ID NO: 566 - DNA, 30 bp, synthetic construct
  misc_feature 1..30: note = Synthetic DNA primer, R194
  modified_base 12: mod_base = OTHER; note = uracil
  modified_base 26: mod_base = OTHER; note = uracil
  source 1..30: mol_type = other DNA
gaggctggttattgaaaccttgttttacat

SEQ ID NO: 567 - DNA, 25 bp, synthetic construct
  misc_feature 1..25: note = Synthetic DNA primer, R195
  modified_base 12: mod_base = OTHER; note = uracil
  modified_base 19: mod_base = OTHER; note = uracil
  source 1..25: mol_type = other DNA
gactacccccgtaccaagtacaaac

SEQ ID NO: 568 - DNA, 19 bp, synthetic construct
  misc_feature 1..19: note = Synthetic DNA primer, R196
  modified_base 6: mod_base = OTHER; note = uracil
  modified_base 16: mod_base = OTHER; note = uracil
  source 1..19: mol_type = other DNA
gatcgtcgaagcggctgac

SEQ ID NO: 569 - DNA, 24 bp, synthetic construct
  misc_feature 1..24: note = Synthetic DNA primer, R197
  modified_base 10: mod_base = OTHER; note = uracil
  modified_base 23: mod_base = OTHER; note = uracil
  source 1..24: mol_type = other DNA
gagactctgtaggctgcagttctc

SEQ ID NO: 570 - DNA, 27 bp, synthetic construct
  misc_feature 1..27: note = Synthetic DNA primer, R198
  modified_base 11: mod_base = OTHER; note = uracil
  modified_base 24: mod_base = OTHER; note = uracil
  source 1..27: mol_type = other DNA
gacttcttcctacctgtttcccatgac

SEQ ID NO: 571 - DNA, 25 bp, synthetic construct
  misc_feature 1..25: note = Synthetic DNA primer, R199
  modified_base 10: mod_base = OTHER; note = uracil
  modified_base 21: mod_base = OTHER; note = uracil
  source 1..25: mol_type = other DNA
gaggacccattagaaccaactccat

SEQ ID NO: 572 - DNA, 23 bp, synthetic construct
  misc_feature 1..23: note = Synthetic DNA primer, R200
  modified_base 9: mod_base = OTHER; note = uracil
  modified_base 19: mod_base = OTHER; note = uracil
  source 1..23: mol_type = other DNA
gaggcttgtgggagaccttgaac

SEQ ID NO: 573 - DNA, 29 bp, synthetic construct
  misc_feature 1..29: note = Synthetic DNA primer, R201
  modified_base 13: mod_base = OTHER; note = uracil
  modified_base 28: mod_base = OTHER; note = uracil
  source 1..29: mol_type = other DNA
gacctggtagtctcaagcagatgttaatg

SEQ ID NO: 574 - DNA, 29 bp, synthetic construct
  misc_feature 1..29: note = Synthetic DNA primer, R202
  modified_base 15: mod_base = OTHER; note = uracil
  modified_base 28: mod_base = OTHER; note = uracil
  source 1..29: mol_type = other DNA
gaaacggacatgagtttgttttccttcta

SEQ ID NO: 575 - DNA, 28 bp, synthetic construct
  misc_feature 1..28: note = Synthetic DNA primer, R203
  modified_base 15: mod_base = OTHER; note = uracil
  modified_base 27: mod_base = OTHER; note = uracil
  source 1..28: mol_type = other DNA
gacagccaacaagattctgaagaacatg

SEQ ID NO: 576 - DNA, 24 bp, synthetic construct
  misc_feature 1..24: note = Synthetic DNA primer, R204
  modified_base 11: mod_base = OTHER; note = uracil
  modified_base 22: mod_base = OTHER; note = uracil
  source 1..24: mol_type = other DNA
gatccctaggtagctaacccctac

SEQ ID NO: 577 - DNA, 26 bp, synthetic construct
  misc_feature 1..26: note = Synthetic DNA primer, R205
  modified_base 14: mod_base = OTHER; note = uracil
  modified_base 25: mod_base = OTHER; note = uracil
  source 1..26: mol_type = other DNA
gaaaaacacggcatgtgaacattctg

SEQ ID NO: 578 - DNA, 28 bp, synthetic construct
  misc_feature 1..28: note = Synthetic DNA primer, R206
  modified_base 10: mod_base = OTHER; note = uracil
  modified_base 18: mod_base = OTHER; note = uracil
  source 1..28: mol_type = other DNA
gagtattcatcgagatttagcagccaga

SEQ ID NO: 579 - DNA, 26 bp, synthetic construct
  misc_feature 1..26: note = Synthetic DNA primer, R207
  modified_base 13: mod_base = OTHER; note = uracil
  modified_base 25: mod_base = OTHER; note = uracil
  source 1..26: mol_type = other DNA
gagagagaggactgactatcggactg

SEQ ID NO: 580 - DNA, 26 bp, synthetic construct
  misc_feature 1..26: note = Synthetic DNA primer, R208
  modified_base 8: mod_base = OTHER; note = uracil
  modified_base 24: mod_base = OTHER; note = uracil
  source 1..26: mol_type = other DNA
gagactgtcaagcagagaatgggtac

SEQ ID NO: 581 - DNA, 35 bp, synthetic construct
  misc_feature 1..35: note = Synthetic DNA primer, R209
  modified_base 16: mod_base = OTHER; note = uracil
  modified_base 31: mod_base = OTHER; note = uracil
  source 1..35: mol_type = other DNA
gagaataggatattgtatcataccaatttctcgat

SEQ ID NO: 582 - DNA, 34 bp, synthetic construct
  misc_feature 1..34: note = Synthetic DNA primer, R210
  modified_base 12: mod_base = OTHER; note = uracil
  modified_base 27: mod_base = OTHER; note = uracil
  source 1..34: mol_type = other DNA
gaacgaaaatgtaagaagattcatcttgaagaag

SEQ ID NO: 583 - DNA, 30 bp, synthetic construct
  misc_feature 1..30: note = Synthetic DNA primer, R211
  modified_base 14: mod_base = OTHER; note = uracil
  modified_base 28: mod_base = OTHER; note = uracil
  source 1..30: mol_type = other DNA
gaaaagccatttttccagatactagagtgt

SEQ ID NO: 584 - RNA, 22 nt, synthetic construct
  misc_feature 1..22: note = Synthetic Primer, R212
  source 1..22: mol_type = other RNA
gagggtccccaagacacctacg

SEQ ID NO: 585 - DNA, 23 bp, synthetic construct
  misc_feature 1..23: note = Synthetic DNA primer, R213
  modified_base 11: mod_base = OTHER; note = uracil
  modified_base 20: mod_base = OTHER; note = uracil
  source 1..23: mol_type = other DNA
gaccgagaactgagggtggtaca

SEQ ID NO: 586 - DNA, 28 bp, synthetic construct
  misc_feature 1..28: note = Synthetic DNA primer, R214
  modified_base 12: mod_base = OTHER; note = uracil
  modified_base 27: mod_base = OTHER; note = uracil
  source 1..28: mol_type = other DNA
gatactagaactcaaaacactggctgtt

SEQ ID NO: 587 - DNA, 32 bp, synthetic construct
  misc_feature 1..32: note = Synthetic DNA primer, R215
  modified_base 15: mod_base = OTHER; note = uracil
  modified_base 29: mod_base = OTHER; note = uracil
  source 1..32: mol_type = other DNA
gagtaagtcttcactttcagattttagttggg

SEQ ID NO: 588 - DNA, 27 bp, synthetic construct
  misc_feature 1..27: note = Synthetic DNA primer, R216
  modified_base 13: mod_base = OTHER; note = uracil
  modified_base 26: mod_base = OTHER; note = uracil
  source 1..27: mol_type = other DNA
gatgcttcctggtctttaggatttctt

SEQ ID NO: 589 - DNA, 25 bp, synthetic construct
  misc_feature 1..25: note = Synthetic DNA primer, R217
  modified_base 12: mod_base = OTHER; note = uracil
  modified_base 24: mod_base = OTHER; note = uracil
  source 1..25: mol_type = other DNA
gattttacttctgcttggtggcatg

SEQ ID NO: 590 - DNA, 32 bp, synthetic construct
  misc_feature 1..32: note = Synthetic DNA primer, R218
  modified_base 14: mod_base = OTHER; note = uracil
  modified_base 31: mod_base = OTHER; note = uracil
  source 1..32: mol_type = other DNA
gattttaccctcatggcttagtagcattattt

SEQ ID NO: 591 - DNA, 31 bp, synthetic construct
  misc_feature 1..31: note = Synthetic DNA primer, R219
  modified_base 11: mod_base = OTHER; note = uracil
  modified_base 21: mod_base = OTHER; note = uracil
  source 1..31: mol_type = other DNA
gaaaaaatattcatccagcttcaggaaaagg

SEQ ID NO: 592 - DNA, 25 bp, synthetic construct
  misc_feature 1..25: note = Synthetic DNA primer, R220
  modified_base 10: mod_base = OTHER; note = uracil
  modified_base 21: mod_base = OTHER; note = uracil
  source 1..25: mol_type = other DNA
gaatcagtctggtggatgggtaaca

SEQ ID NO: 593 - DNA, 35 bp, synthetic construct
  misc_feature 1..35: note = Synthetic DNA primer, R221
  modified_base 17: mod_base = OTHER; note = uracil
  modified_base 30: mod_base = OTHER; note = uracil
  source 1..35: mol_type = other DNA
gactaataatgaataattgggtatgaggctacagt

SEQ ID NO: 594 - DNA, 25 bp, synthetic construct
  misc_feature 1..25: note = Synthetic DNA primer, R222
  modified_base 16: mod_base = OTHER; note = uracil
  modified_base 24: mod_base = OTHER; note = uracil
  source 1..25: mol_type = other DNA
gatgtgagagagcaatcaaggagtg

SEQ ID NO: 595 - DNA, 29 bp, synthetic construct
  misc_feature 1..29: note = Synthetic DNA primer, R223
  modified_base 12: mod_base = OTHER; note = uracil
  modified_base 28: mod_base = OTHER; note = uracil
  source 1..29: mol_type = other DNA
gagtctgagagtagaaggcagattctgta

SEQ ID NO: 596 - DNA, 26 bp, synthetic construct
  misc_feature 1..26: note = Synthetic DNA primer, R224
  modified_base 8: mod_base = OTHER; note = uracil
  modified_base 18: mod_base = OTHER; note = uracil
  source 1..26: mol_type = other DNA
gaaactttgcggagatctgaaaacca

SEQ ID NO: 597 - DNA, 30 bp, synthetic construct
  misc_feature 1..30: note = Synthetic DNA primer, R225
  modified_base 18: mod_base = OTHER; note = uracil
  modified_base 28: mod_base = OTHER; note = uracil
  source 1..30: mol_type = other DNA
gactctaaagaaggaagtgagaacttctcc

SEQ ID NO: 598 - DNA, 31 bp, synthetic construct
  misc_feature 1..31: note = Synthetic DNA primer, R226
  modified_base 13: mod_base = OTHER; note = uracil
  modified_base 28: mod_base = OTHER; note = uracil
  source 1..31: mol_type = other DNA
gactttcttcactcaaagtgcctattttgac

SEQ ID NO: 599 - DNA, 32 bp, synthetic construct
  misc_feature 1..32: note = Synthetic DNA primer, R227
  modified_base 16: mod_base = OTHER; note = uracil
  modified_base 27: mod_base = OTHER; note = uracil
  source 1..32: mol_type = other DNA
gattcttttgagaactgagtgatttatgacct

SEQ ID NO: 600 - DNA, 33 bp, synthetic construct
  misc_feature 1..33: note = Synthetic DNA primer, R228
  modified_base 9: mod_base = OTHER; note = uracil
  modified_base 27: mod_base = OTHER; note = uracil
  source 1..33: mol_type = other DNA
gaagaagttagaaacagaactgtatgtaagcat

SEQ ID NO: 601 - DNA, 34 bp, synthetic construct
  misc_feature 1..34: note = Synthetic DNA primer, R229
  modified_base 15: mod_base = OTHER; note = uracil
  modified_base 33: mod_base = OTHER; note = uracil
  source 1..34: mol_type = other DNA
gagctatacgaacttagaagtgagaaataatctt

SEQ ID NO: 602 - DNA, 34 bp, synthetic construct
  misc_feature 1..34: note = Synthetic DNA primer, R230
  modified_base 13: mod_base = OTHER; note = uracil
  modified_base 32: mod_base = OTHER; note = uracil
  source 1..34: mol_type = other DNA
gatttctccaggtccaaaatgaataactatttga

SEQ ID NO: 603 - DNA, 25 bp, synthetic construct
  misc_feature 1..25: note = Synthetic DNA primer, R231
  modified_base 11: mod_base = OTHER; note = uracil
  modified_base 24: mod_base = OTHER; note = uracil
  source 1..25: mol_type = other DNA
gaatccaggataggaagcacacatg

SEQ ID NO: 604 - DNA, 34 bp, synthetic construct
  misc_feature 1..34: note = Synthetic DNA primer, R232
  modified_base 17: mod_base = OTHER; note = uracil
  modified_base 32: mod_base = OTHER; note = uracil
  source 1..34: mol_type = other DNA
gattttataactagattttccttctctccattcc

SEQ ID NO: 605 - DNA, 33 bp, synthetic construct
  misc_feature 1..33: note = Synthetic DNA primer, R233
  modified_base 13: mod_base = OTHER; note = uracil
  modified_base 25: mod_base = OTHER; note = uracil
  source 1..33: mol_type = other DNA
gaaattcatacatttttctctaactgcaaacat

SEQ ID NO: 606 - DNA, 29 bp, synthetic construct
  misc_feature 1..29: note = Synthetic DNA primer, R234
  modified_base 10: mod_base = OTHER; note = uracil
  modified_base 26: mod_base = OTHER; note = uracil
  source 1..29: mol_type = other DNA
gagcagttgtgagattatcttttcatggc

SEQ ID NO: 607 - DNA, 34 bp, synthetic construct
  misc_feature 1..34: note = Synthetic DNA primer, R235
  modified_base 14: mod_base = OTHER; note = uracil
  modified_base 29: mod_base = OTHER; note = uracil
  source 1..34: mol_type = other DNA
gatgtttttctaatgtgttaaagttcattggaac

SEQ ID NO: 608 - DNA, 24 bp, synthetic construct
  misc_feature 1..24: note = Synthetic DNA primer, R236
  modified_base 12: mod_base = OTHER; note = uracil
  modified_base 23: mod_base = OTHER; note = uracil
  source 1..24: mol_type = other DNA
gaccatgactgtcacagtgacctt

SEQ ID NO: 609 - DNA, 22 bp, synthetic construct
  misc_feature 1..22: note = Synthetic DNA primer, R237
  modified_base 6: mod_base = OTHER; note = uracil
  modified_base 21: mod_base = OTHER; note = uracil
  source 1..22: mol_type = other DNA
gattgtggcccaaacaaagctc

SEQ ID NO: 610 - DNA, 30 bp, synthetic construct
  misc_feature 1..30: note = Synthetic DNA primer, R238
  modified_base 14: mod_base = OTHER; note = uracil
  modified_base 25: mod_base = OTHER; note = uracil
  source 1..30: mol_type = other DNA
gagtgcttggaaatggaatggttttagaat

SEQ ID NO: 611 - DNA, 28 bp, synthetic construct
  misc_feature 1..28: note = Synthetic DNA primer, R239
  modified_base 9: mod_base = OTHER; note = uracil
  modified_base 25: mod_base = OTHER; note = uracil
  source 1..28: mol_type = other DNA
gactactgtaaccaagaggtgacttcag

SEQ ID NO: 612 - DNA, 21 bp, synthetic construct
  misc_feature 1..21: note = Synthetic DNA primer, R240
  modified_base 9: mod_base = OTHER; note = uracil
  modified_base 15: mod_base = OTHER; note = uracil
  source 1..21: mol_type = other DNA
gaagccgatatccctgcagac

SEQ ID NO: 613 - DNA, 22 bp, synthetic construct
  misc_feature 1..22: note = Synthetic DNA primer, R241
  modified_base 8: mod_base = OTHER; note = uracil
  modified_base 14: mod_base = OTHER; note = uracil
  source 1..22: mol_type = other DNA
gagtcggtgtagatgcacagct

SEQ ID NO: 614 - DNA, 22 bp, synthetic construct
  misc_feature 1..22: note = Synthetic DNA primer, R242
  modified_base 12: mod_base = OTHER; note = uracil
  modified_base 19: mod_base = OTHER; note = uracil
  source 1..22: mol_type = other DNA
gatgcccaaggtactgcatggt

SEQ ID NO: 615 - RNA, 22 nt, synthetic construct
  misc_feature 1..22: note = Synthetic Primer, R243
  source 1..22: mol_type = other RNA
gactcacgcctaaaccagaacc

SEQ ID NO: 616 - DNA, 20 bp, synthetic construct
  misc_feature 1..20: note = Synthetic DNA primer, R244
  modified_base 11: mod_base = OTHER; note = uracil
  modified_base 19: mod_base = OTHER; note = uracil
  source 1..20: mol_type = other DNA
gatagctggctccgcacctt

SEQ ID NO: 617 - DNA, 19 bp, synthetic construct
  misc_feature 1..19: note = Synthetic DNA primer, R245
  modified_base 7: mod_base = OTHER; note = uracil
  modified_base 16: mod_base = OTHER; note = uracil
  source 1..19: mol_type = other DNA
gactgctgggcgccgtaac

SEQ ID NO: 618 - DNA, 23 bp, synthetic construct
  misc_feature 1..23: note = Synthetic DNA primer, R246
  modified_base 18: mod_base = OTHER; note = uracil
  modified_base 22: mod_base = OTHER; note = uracil
  source 1..23: mol_type = other DNA
gaacccacacaagcgaatctctg

SEQ ID NO: 619 - DNA, 26 bp, synthetic construct
  misc_feature 1..26: note = Synthetic DNA primer, R247
  modified_base 10: mod_base = OTHER; note = uracil
  modified_base 24: mod_base = OTHER; note = uracil
  source 1..26: mol_type = other DNA
gaactttgctgccttaatgacattcc

SEQ ID NO: 620 - DNA, 23 bp, synthetic construct
  misc_feature 1..23: note = Synthetic DNA primer, R248
  modified_base 9: mod_base = OTHER; note = uracil
  modified_base 22: mod_base = OTHER; note = uracil
  source 1..23: mol_type = other DNA
gaggtacctgagatggaggagtc

SEQ ID NO: 621 - DNA, 27 bp, synthetic construct
  misc_feature 1..27: note = Synthetic DNA primer, R249
  modified_base 12: mod_base = OTHER; note = uracil
  modified_base 26: mod_base = OTHER; note = uracil
  source 1..27: mol_type = other DNA
gattgagccactaagcagtaaccattc

SEQ ID NO: 622 - DNA, 23 bp, synthetic construct
  misc_feature 1..23: note = Synthetic DNA primer, R250
  modified_base 10: mod_base = OTHER; note = uracil
  modified_base 21: mod_base = OTHER; note = uracil
  source 1..23: mol_type = other DNA
gacccgaagttcttctgcagtcc

SEQ ID NO: 623 - DNA, 23 bp, synthetic construct
  misc_feature 1..23: note = Synthetic DNA primer, R251
  modified_base 13: mod_base = OTHER; note = uracil
  modified_base 19: mod_base = OTHER; note = uracil
  source 1..23: mol_type = other DNA
gagccgaaacgatcaaggtgagt

SEQ ID NO: 624 - DNA, 30 bp, synthetic construct
  misc_feature 1..30: note = Synthetic DNA primer, R252
  modified_base 15: mod_base = OTHER; note = uracil
  modified_base 26: mod_base = OTHER; note = uracil
  source 1..30: mol_type = other DNA
gatcagtagaaagatggtaccaaaatgggt

SEQ ID NO: 625 - DNA, 20 bp, synthetic construct
  misc_feature 1..20: note = Synthetic DNA primer, R253
  modified_base 11: mod_base = OTHER; note = uracil
  modified_base 18: mod_base = OTHER; note = uracil
  source 1..20: mol_type = other DNA
gagaccgagctcgggtgtat

SEQ ID NO: 626 - DNA, 27 bp, synthetic construct
  misc_feature 1..27: note = Synthetic DNA primer, R254
  modified_base 13: mod_base = OTHER; note = uracil
  modified_base 26: mod_base = OTHER; note = uracil
  source 1..27: mol_type = other DNA
gagcctttgtggtcatgggaaagtata

SEQ ID NO: 627 - DNA, 33 bp, synthetic construct
  misc_feature 1..33: note = Synthetic DNA primer, R255
  modified_base 16: mod_base = OTHER; note = uracil
  modified_base 32: mod_base = OTHER; note = uracil
  source 1..33: mol_type = other DNA
gaatttgcctgaaattacacatagaactttctg

SEQ ID NO: 628 - DNA, 23 bp, synthetic construct
  misc_feature 1..23: note = Synthetic DNA primer, R256
  modified_base 11: mod_base = OTHER; note = uracil
  modified_base 20: mod_base = OTHER; note = uracil
  source 1..23: mol_type = other DNA
gagggatgggtgactgagatggt

SEQ ID NO: 629 - DNA, 22 bp, synthetic construct
  misc_feature 1..22: note = Synthetic DNA primer, R257
  modified_base 10: mod_base = OTHER; note = uracil
  modified_base 16: mod_base = OTHER; note = uracil
  source 1..22: mol_type = other DNA
gagtggacatgcgaatggagga

SEQ ID NO: 630 - DNA, 34 bp, synthetic construct
  misc_feature 1..34: note = Synthetic DNA primer, R258
  modified_base 17: mod_base = OTHER; note = uracil
  modified_base 33: mod_base = OTHER; note = uracil
  source 1..34: mol_type = other DNA
gatttactctgacagctaaatgaactcaaatgta

SEQ ID NO: 631 - DNA, 29 bp, synthetic construct
  misc_feature 1..29: note = Synthetic DNA primer, R259
  modified_base 16: mod_base = OTHER; note = uracil
  modified_base 28: mod_base = OTHER; note = uracil
  source 1..29: mol_type = other DNA
gaaggctcagaacactttactgaattttg

SEQ ID NO: 632 - DNA, 32 bp, synthetic construct
  misc_feature 1..32: note = Synthetic DNA primer, R260
  modified_base 18: mod_base = OTHER; note = uracil
  modified_base 28: mod_base = OTHER; note = uracil
  source 1..32: mol_type = other DNA
gattacttagaagaaaattgctccttgtcaga

SEQ ID NO: 633 - DNA, 28 bp, synthetic construct
  misc_feature 1..28: note = Synthetic DNA primer, R261
  modified_base 16: mod_base = OTHER; note = uracil
  modified_base 23: mod_base = OTHER; note = uracil
  source 1..28: mol_type = other DNA
gagtgaaggaaaccattcgtgataaagc

SEQ ID NO: 634 - DNA, 26 bp, synthetic construct
  misc_feature 1..26: note = Synthetic DNA primer, R262
  modified_base 9: mod_base = OTHER; note = uracil
  modified_base 23: mod_base = OTHER; note = uracil
  source 1..26: mol_type = other DNA
gagaaaattggacccagttctctgct

SEQ ID NO: 635 - DNA, 31 bp, synthetic construct
  misc_feature 1..31: note = Synthetic DNA primer, R263
  modified_base 13: mod_base = OTHER; note = uracil
  modified_base 27: mod_base = OTHER; note = uracil
  source 1..31: mol_type = other DNA
gaatctttcaactgtaaaattcactgtgggt

SEQ ID NO: 636 - DNA, 27 bp, synthetic construct
  misc_feature 1..27: note = Synthetic DNA primer, R264
  modified_base 12: mod_base = OTHER; note = uracil
  modified_base 23: mod_base = OTHER; note = uracil
  source 1..27: mol_type = other DNA
gaccattctcatatcctaggtctgcct

SEQ ID NO: 637 - DNA, 23 bp, synthetic construct
  misc_feature 1..23: note = Synthetic DNA primer, R265
  modified_base 7: mod_base = OTHER; note = uracil
  modified_base 14: mod_base = OTHER; note = uracil
  source 1..23: mol_type = other DNA
gagcactccattttggacagcaa

SEQ ID NO: 638 - DNA, 34 bp, synthetic construct
  misc_feature 1..34: note = Synthetic DNA primer, R266
  modified_base 16: mod_base = OTHER; note = uracil
  modified_base 32: mod_base = OTHER; note = uracil
  source 1..34: mol_type = other DNA
gagtttattttctggtttcaatagaacaagttga

SEQ ID NO: 639 - DNA, 34 bp, synthetic construct
  misc_feature 1..34: note = Synthetic DNA primer, R267
  modified_base 16: mod_base = OTHER; note = uracil
  modified_base 33: mod_base = OTHER; note = uracil
  source 1..34: mol_type = other DNA
gatttgaaaggtagattgccataatgtatcattg

SEQ ID NO: 640 - DNA, 33 bp, synthetic construct
  misc_feature 1..33: note = Synthetic DNA primer, R268
  modified_base 14: mod_base = OTHER; note = uracil
  modified_base 30: mod_base = OTHER; note = uracil
  source 1..33: mol_type = other DNA
gaatgtggaatctttgtttagttttactctggt

SEQ ID NO: 641 - DNA, 32 bp, synthetic construct
  misc_feature 1..32: note = Synthetic DNA primer, R269
  modified_base 14: mod_base = OTHER; note = uracil
  modified_base 31: mod_base = OTHER; note = uracil
  source 1..32: mol_type = other DNA
gaatggtttagtctgacacatatttaacactt

SEQ ID NO: 642 - DNA, 34 bp, synthetic construct
  misc_feature 1..34: note = Synthetic DNA primer, R270
  modified_base 14: mod_base = OTHER; note = uracil
  modified_base 32: mod_base = OTHER; note = uracil
  source 1..34: mol_type = other DNA
gattttcaagttatagaaacatgtcatgttgtca

SEQ ID NO: 643 - DNA, 34 bp, synthetic construct
  misc_feature 1..34: note = Synthetic DNA primer, R271
  modified_base 11: mod_base = OTHER; note = uracil
  modified_base 29: mod_base = OTHER; note = uracil
  source 1..34: mol_type = other DNA
gactagactttgagacctgctaaataattagatg

SEQ ID NO: 644 - RNA, 23 nt, synthetic construct
  misc_feature 1..23: note = Synthetic Primer, R272
  source 1..23: mol_type = other RNA
gacaggtccaagtgaaccaggga

SEQ ID NO: 645 - DNA, 20 bp, synthetic construct
  misc_feature 1..20: note = Synthetic DNA primer, R273
  modified_base 10: mod_base = OTHER; note = uracil
  modified_base 19: mod_base = OTHER; note = uracil
  source 1..20: mol_type = other DNA
gaagggcactgaccctggta

SEQ ID NO: 646 - DNA, 22 bp, synthetic construct
  misc_feature 1..22: note = Synthetic DNA primer, R274
  modified_base 15: mod_base = OTHER; note = uracil
  modified_base 21: mod_base = OTHER; note = uracil
  source 1..22: mol_type = other DNA
gatctgcaggagggtgctctta

SEQ ID NO: 647 - DNA, 23 bp, synthetic construct
  misc_feature 1..23: note = Synthetic DNA primer, R275
  modified_base 10: mod_base = OTHER; note = uracil
  modified_base 21: mod_base = OTHER; note = uracil
  source 1..23: mol_type = other DNA
gagggcaactacacctgcattgt

SEQ ID NO: 648 - DNA, 26 bp, synthetic construct
  misc_feature 1..26: note = Synthetic DNA primer, R276
  modified_base 14: mod_base = OTHER; note = uracil
  modified_base 25: mod_base = OTHER; note = uracil
  source 1..26: mol_type = other DNA
gatgccaagacagtgaagttcaaatg

SEQ ID NO: 649 - DNA, 24 bp, synthetic construct
  misc_feature 1..24: note = Synthetic DNA primer, R277
  modified_base 12: mod_base = OTHER; note = uracil
  modified_base 22: mod_base = OTHER; note = uracil
  source 1..24: mol_type = other DNA
gagacaccacctacttctccgtca

SEQ ID NO: 650 - DNA, 31 bp, synthetic construct
  misc_feature 1..31: note = Synthetic DNA primer, R278
  modified_base 18: mod_base = OTHER; note = uracil
  modified_base 28: mod_base = OTHER; note = uracil
  source 1..31: mol_type = other DNA
gaaagaccaaaagagaatggaaagtactgac

SEQ ID NO: 651 - DNA, 25 bp, synthetic construct
  misc_feature 1..25: note = Synthetic DNA primer, R279
  modified_base 7: mod_base = OTHER; note = uracil
  modified_base 15: mod_base = OTHER; note = uracil
  source 1..25: mol_type = other DNA
gaagagtatccatctccaggagacg

SEQ ID NO: 652 - DNA, 20 bp, synthetic construct
  misc_feature 1..20: note = Synthetic DNA primer, R280
  modified_base 9: mod_base = OTHER; note = uracil
  modified_base 19: mod_base = OTHER; note = uracil
  source 1..20: mol_type = other DNA
gatgtggctctccgcccatt

SEQ ID NO: 653 - DNA, 28 bp, synthetic construct
  misc_feature 1..28: note = Synthetic DNA primer, R281
  modified_base 13: mod_base = OTHER; note = uracil
  modified_base 27: mod_base = OTHER; note = uracil
  source 1..28: mol_type = other DNA
gagctacaccattagcttcactgatttt

SEQ ID NO: 654 - DNA, 29 bp, synthetic construct
  misc_feature 1..29: note = Synthetic DNA primer, R282
  modified_base 11: mod_base = OTHER; note = uracil
  modified_base 28: mod_base = OTHER; note = uracil
  source 1..29: mol_type = other DNA
gactggatggtaagaggagtttcttcatc

SEQ ID NO: 655 - DNA, 23 bp, synthetic construct
  misc_feature 1..23: note = Synthetic DNA primer, R283
  modified_base 12: mod_base = OTHER; note = uracil
  modified_base 21: mod_base = OTHER; note = uracil
  source 1..23: mol_type = other DNA
gacctttcccctcccctacctag

SEQ ID NO: 656 - DNA, 34 bp, synthetic construct
  misc_feature 1..34: note = Synthetic DNA primer, R284
  modified_base 13: mod_base = OTHER; note = uracil
  modified_base 33: mod_base = OTHER; note = uracil
  source 1..34: mol_type = other DNA
gacaaaacaaagtcaaagagaattatgaaatgtg

SEQ ID NO: 657 - DNA, 31 bp, synthetic construct
  misc_feature 1..31: note = Synthetic DNA primer, R285
  modified_base 12: mod_base = OTHER; note = uracil
  modified_base 27: mod_base = OTHER; note = uracil
  source 1..31: mol_type = other DNA
gacagggattttggttactactttgctaaga

SEQ ID NO: 658 - DNA, 26 bp, synthetic construct
  misc_feature 1..26: note = Synthetic DNA primer, R286
  modified_base 11: mod_base = OTHER; note = uracil
  modified_base 22: mod_base = OTHER; note = uracil
  source 1..26: mol_type = other DNA
gattgtcttctggacacgttctgaaa

SEQ ID NO: 659 - DNA, 34 bp, synthetic construct
  misc_feature 1..34: note = Synthetic DNA primer, R287
  modified_base 15: mod_base = OTHER; note = uracil
  modified_base 30: mod_base = OTHER; note = uracil
  source 1..34: mol_type = other DNA
gatattaagctttcttggaaaattctctttccct

SEQ ID NO: 660 - DNA, 27 bp, synthetic construct
  misc_feature 1..27: note = Synthetic DNA primer, R288
  modified_base 12: mod_base = OTHER; note = uracil
  modified_base 23: mod_base = OTHER; note = uracil
  source 1..27: mol_type = other DNA
gattcagaagttaggaaaggagtccag

SEQ ID NO: 661 - RNA, 20 nt, synthetic construct
  misc_feature 1..20: note = Synthetic Primer, R289
  source 1..20: mol_type = other RNA
gacacctgtcacccgcacac

SEQ ID NO: 662 - DNA, 23 bp, synthetic construct
  misc_feature 1..23: note = Synthetic DNA primer, R290
  modified_base 10: mod_base = OTHER; note = uracil
  modified_base 19: mod_base = OTHER; note = uracil
  source 1..23: mol_type = other DNA
gacagtcagtaacgccagtgagt

SEQ ID NO: 663 - DNA, 20 bp, synthetic construct
  misc_feature 1..20: note = Synthetic DNA primer, R291
  modified_base 4: mod_base = OTHER; note = uracil
  modified_base 12: mod_base = OTHER; note = uracil
  source 1..20: mol_type = other DNA
gagtcccgtggtgcaaaggc

SEQ ID NO: 664 - DNA, 32 bp, synthetic construct
  misc_feature 1..32: note = Synthetic DNA primer, R292
  modified_base 16: mod_base = OTHER; note = uracil
  modified_base 31: mod_base = OTHER; note = uracil
  source 1..32: mol_type = other DNA
gaatgtacactagtttccggaataaacctttt

SEQ ID NO: 665 - DNA, 20 bp, synthetic construct
  misc_feature 1..20: note = Synthetic DNA primer, R293
  modified_base 5: mod_base = OTHER; note = uracil
  modified_base 12: mod_base = OTHER; note = uracil
  source 1..20: mol_type = other DNA
gacttgacccctgcgagcca

SEQ ID NO: 666 - DNA, 23 bp, synthetic construct
  misc_feature 1..23: note = Synthetic DNA primer, R294
  modified_base 8: mod_base = OTHER; note = uracil
  modified_base 21: mod_base = OTHER; note = uracil
  source 1..23: mol_type = other DNA
gacccactcaagctcagctgtaa

SEQ ID NO: 667 - DNA, 27 bp, synthetic construct
  misc_feature 1..27: note = Synthetic DNA primer, R295
  modified_base 14: mod_base = OTHER; note = uracil
  modified_base 26: mod_base = OTHER; note = uracil
  source 1..27: mol_type = other DNA
gactgagaatggctacctctcgatatg

SEQ ID NO: 668 - DNA, 27 bp, synthetic construct
  misc_feature 1..27: note = Synthetic DNA primer, R296
  modified_base 11: mod_base = OTHER; note = uracil
  modified_base 24: mod_base = OTHER; note = uracil
  source 1..27: mol_type = other DNA
gaggctggagttggtgttatagttcaa

SEQ ID NO: 669 - DNA, 29 bp, synthetic construct
  misc_feature 1..29: note = Synthetic DNA primer, R297
  modified_base 13: mod_base = OTHER; note = uracil
  modified_base 28: mod_base = OTHER; note = uracil
  source 1..29: mol_type = other DNA
gactcacacatcttgagcccatttttatc

SEQ ID NO: 670 - DNA, 25 bp, synthetic construct
  misc_feature 1..25: note = Synthetic DNA primer, R298
  modified_base 12: mod_base = OTHER; note = uracil
  modified_base 24: mod_base = OTHER; note = uracil
  source 1..25: mol_type = other DNA
gactgagagggtgtcacataccatg

SEQ ID NO: 671 - DNA, 27 bp, synthetic construct
  misc_feature 1..27: note = Synthetic DNA primer, R299
  modified_base 15: mod_base = OTHER; note = uracil
  modified_base 25: mod_base = OTHER; note = uracil
  source 1..27: mol_type = other DNA
gattcataccgacatgtaggaccttgt

SEQ ID NO: 672 - DNA, 22 bp, synthetic construct
  misc_feature 1..22: note = Synthetic DNA primer, R300
  modified_base 8: mod_base = OTHER; note = uracil
  modified_base 21: mod_base = OTHER; note = uracil
  source 1..22: mol_type = other DNA
gaacttctcacaccgctgtgtt

SEQ ID NO: 673 - DNA, 22 bp, synthetic construct
  misc_feature 1..22: note = Synthetic DNA primer, R301
  modified_base 10: mod_base = OTHER; note = uracil
  modified_base 19: mod_base = OTHER; note = uracil
  source 1..22: mol_type = other DNA
gacctcacctccgtttcctgca

SEQ ID NO: 674 - DNA, 21 bp, synthetic construct
  misc_feature 1..21: note = Synthetic DNA primer, R302
  modified_base 5: mod_base = OTHER; note = uracil
  modified_base 14: mod_base = OTHER; note = uracil
  source 1..21: mol_type = other DNA
gatctggcccccttaggagga

SEQ ID NO: 675 - DNA, 27 bp, synthetic construct
  misc_feature 1..27: note = Synthetic DNA primer, R303
  modified_base 11: mod_base = OTHER; note = uracil
  modified_base 25: mod_base = OTHER; note = uracil
  source 1..27: mol_type = other DNA
gatcatcctctccccatagaaaagtcc

SEQ ID NO: 676 - DNA, 25 bp, synthetic construct
  misc_feature 1..25: note = Synthetic DNA primer, R304
  modified_base 7: mod_base = OTHER; note = uracil
  modified_base 17: mod_base = OTHER; note = uracil
  source 1..25: mol_type = other DNA
gatctctgccatcatttccggaaag

SEQ ID NO: 677 - DNA, 25 bp, synthetic construct
  misc_feature 1..25: note = Synthetic DNA primer, R305
  modified_base 12: mod_base = OTHER; note = uracil
  modified_base 22: mod_base = OTHER; note = uracil
  source 1..25: mol_type = other DNA
gatgcaaggaatgcgatgaagtaga

SEQ ID NO: 678 - DNA, 23 bp, synthetic construct
  misc_feature 1..23: note = Synthetic DNA primer, R306
  modified_base 8: mod_base = OTHER; note = uracil
  modified_base 22: mod_base = OTHER; note = uracil
  source 1..23: mol_type = other DNA
gagtcgctaacacgtgtgtgttc

SEQ ID NO: 679 - DNA, 29 bp, synthetic construct
  misc_feature 1..29: note = Synthetic DNA primer, R307
  modified_base 13: mod_base = OTHER; note = uracil
  modified_base 27: mod_base = OTHER; note = uracil
  source 1..29: mol_type = other DNA
gatggctaaacttgacctttttactctgc

SEQ ID NO: 680 - DNA, 22 bp, synthetic construct
  misc_feature 1..22: note = Synthetic DNA primer, R308
  modified_base 13: mod_base = OTHER; note = uracil
  modified_base 20: mod_base = OTHER; note = uracil
  source 1..22: mol_type = other DNA
gattcctcagcatcgaccttgc

SEQ ID NO: 681 - DNA, 32 bp, synthetic construct
  misc_feature 1..32: note = Synthetic DNA primer, R309
  modified_base 15: mod_base = OTHER; note = uracil
  modified_base 29: mod_base = OTHER; note = uracil
  source 1..32: mol_type = other DNA
gaaatctatatacttccttacctgggattgga

SEQ ID NO: 682 - DNA, 25 bp, synthetic construct
  misc_feature 1..25: note = Synthetic DNA primer, R310
  modified_base 14: mod_base = OTHER; note = uracil
  modified_base 24: mod_base = OTHER; note = uracil
  source 1..25: mol_type = other DNA
gaacatgctgagatcagccaaattc

SEQ ID NO: 683 - DNA, 27 bp, synthetic construct
  misc_feature 1..27: note = Synthetic DNA primer, R311
  modified_base 7: mod_base = OTHER; note = uracil
  modified_base 18: mod_base = OTHER; note = uracil
  source 1..27: mol_type = other DNA
gagcagtgaaaagagtctcaaacacaa

SEQ ID NO: 684 - DNA, 21 bp, synthetic construct
  misc_feature 1..21: note = Synthetic DNA primer, R312
  modified_base 13: mod_base = OTHER; note = uracil
  modified_base 17: mod_base = OTHER; note = uracil
  source 1..21: mol_type = other DNA
gacccacaggccttcttcgag

SEQ ID NO: 685 - DNA, 25 bp, synthetic construct
  misc_feature 1..25: note = Synthetic DNA primer, R313
  modified_base 7: mod_base = OTHER; note = uracil
  modified_base 17: mod_base = OTHER; note = uracil
  source 1..25: mol_type = other DNA
gactggtatgagaaactgcacgagt

SEQ ID NO: 686 - DNA, 27 bp, synthetic construct
  misc_feature 1..27: note = Synthetic DNA primer, R314
  modified_base 13: mod_base = OTHER; note = uracil
  modified_base 25: mod_base = OTHER; note = uracil
  source 1..27: mol_type = other DNA
gaaataccaatctattgtgggctctgg

SEQ ID NO: 687 - DNA, 27 bp, synthetic construct
  misc_feature 1..27: note = Synthetic DNA primer, R315
  modified_base 11: mod_base = OTHER; note = uracil
  modified_base 25: mod_base = OTHER; note = uracil
  source 1..27: mol_type = other DNA
gacctccttctgcatggtattctttct

SEQ ID NO: 688 - DNA, 26 bp, synthetic construct
  misc_feature 1..26: note = Synthetic DNA primer, R316
  modified_base 13: mod_base = OTHER; note = uracil
  modified_base 23: mod_base = OTHER; note = uracil
  source 1..26: mol_type = other DNA
gaattaaagcagtgctcatgattggg

SEQ ID NO: 689 - DNA, 23 bp, synthetic construct
  misc_feature 1..23: note = Synthetic DNA primer, R317
  modified_base 9: mod_base = OTHER; note = uracil
  modified_base 21: mod_base = OTHER; note = uracil
  source 1..23: mol_type = other DNA
gacgggactcgagtgatgattgg

SEQ ID NO: 690 - DNA, 26 bp, synthetic construct
  misc_feature 1..26: note = Synthetic DNA primer, R318
  modified_base 12: mod_base = OTHER; note = uracil
  modified_base 24: mod_base = OTHER; note = uracil
  source 1..26: mol_type = other DNA
gacttcacctttaacacctccagtcc

SEQ ID NO: 691 - DNA, 30 bp, synthetic construct
  misc_feature 1..30: note = Synthetic DNA primer, R319
  modified_base 13: mod_base = OTHER; note = uracil
  modified_base 26: mod_base = OTHER; note = uracil
  source 1..30: mol_type = other DNA
gactcctctagctatcttaatgacttggac

SEQ ID NO: 692 - DNA, 34 bp, synthetic construct
  misc_feature 1..34: note = Synthetic DNA primer, R320
  modified_base 13: mod_base = OTHER; note = uracil
  modified_base 28: mod_base = OTHER; note = uracil
  source 1..34: mol_type = other DNA
gactgctttcattcatagggaaatacataagaaa

SEQ ID NO: 693 - DNA, 34 bp, synthetic construct
  misc_feature 1..34: note = Synthetic DNA primer, R321
  modified_base 17: mod_base = OTHER; note = uracil
  modified_base 27: mod_base = OTHER; note = uracil
  source 1..34: mol_type = other DNA
gattcaatattttaaatagtctggcctaaacggt

SEQ ID NO: 694 - DNA, 34 bp, synthetic construct
  misc_feature 1..34: note = Synthetic DNA primer, R322
  modified_base 13: mod_base = OTHER; note = uracil
  modified_base 26: mod_base = OTHER; note = uracil
  source 1..34: mol_type = other DNA
gatgatttccagtattaattggcaataagagaat

SEQ ID NO: 695 - DNA, 34 bp, synthetic construct
  misc_feature 1..34: note = Synthetic DNA primer, R323
  modified_base 11: mod_base = OTHER; note = uracil
  modified_base 27: mod_base = OTHER; note = uracil
  source 1..34: mol_type = other DNA
gaatgaaagctaaaacataagatgaatgggaaaa

SEQ ID NO: 696 - DNA, 33 bp, synthetic construct
  misc_feature 1..33: note = Synthetic DNA primer, R324
  modified_base 18: mod_base = OTHER; note = uracil
  modified_base 31: mod_base = OTHER; note = uracil
  source 1..33: mol_type = other DNA
gaattatttcttaccacttttcctttctcctgt

SEQ ID NO: 697 - DNA, 28 bp, synthetic construct
  misc_feature 1..28: note = Synthetic DNA primer, R325
  modified_base 13: mod_base = OTHER; note = uracil
  modified_base 25: mod_base = OTHER; note = uracil
  source 1..28: mol_type = other DNA
gaattgtgagattaacagcagggatacc

SEQ ID NO: 698 - DNA, 35 bp, synthetic construct
  misc_feature 1..35: note = Synthetic DNA primer, R326
  modified_base 15: mod_base = OTHER; note = uracil
  modified_base 34: mod_base = OTHER; note = uracil
  source 1..35: mol_type = other DNA
gagcttcattgtcttgataaaatttatggtatctt

SEQ ID NO: 699 - DNA, 34 bp, synthetic construct
  misc_feature 1..34: note = Synthetic DNA primer, R327
  modified_base 12: mod_base = OTHER; note = uracil
  modified_base 27: mod_base = OTHER; note = uracil
  source 1..34: mol_type = other DNA
gaccagctctttcatatcttaacatttagcaaca

SEQ ID NO: 700 - DNA, 33 bp, synthetic construct
  misc_feature 1..33: note = Synthetic DNA primer, R328
  modified_base 15: mod_base = OTHER; note = uracil
  modified_base 32: mod_base = OTHER; note = uracil
  source 1..33: mol_type = other DNA
gagccaaaacattttgtccctttctataatttg

SEQ ID NO: 701 - DNA, 25 bp, synthetic construct
  misc_feature 1..25: note = Synthetic DNA primer, R329
  modified_base 14: mod_base = OTHER; note = uracil
  modified_base 24: mod_base = OTHER; note = uracil
  source 1..25: mol_type = other DNA
gatggacttcaagtgatcacttgtg

SEQ ID NO: 702 - DNA, 22 bp, synthetic construct
  misc_feature 1..22: note = Synthetic DNA primer, R330
  modified_base 9: mod_base = OTHER; note = uracil
  modified_base 19: mod_base = OTHER; note = uracil
  source 1..22: mol_type = other DNA
gaagcctgtggtgctttttgcg

SEQ ID NO: 703 - DNA, 29 bp, synthetic construct
  misc_feature 1..29: note = Synthetic DNA primer, R331
  modified_base 12: mod_base = OTHER; note = uracil
  modified_base 25: mod_base = OTHER; note = uracil
  source 1..29: mol_type = other DNA
gaaagtcaaactacactcagaacctgaat

SEQ ID NO: 704 - DNA, 30 bp, synthetic construct
  misc_feature 1..30: note = Synthetic DNA primer, R332
  modified_base 17: mod_base = OTHER; note = uracil
  modified_base 29: mod_base = OTHER; note = uracil
  source 1..30: mol_type = other DNA
gagcaaaggccaaagataaaatgcttactg

SEQ ID NO: 705 - DNA, 32 bp, synthetic construct
  misc_feature 1..32: note = Synthetic DNA primer, R333
  modified_base 14: mod_base = OTHER; note = uracil
  modified_base 29: mod_base = OTHER; note = uracil
  source 1..32: mol_type = other DNA
gaaagctacagaatgtgaacagtcttcttaaa

SEQ ID NO: 706 - DNA, 30 bp, synthetic construct
  misc_feature 1..30: note = Synthetic DNA primer, R334
  modified_base 11: mod_base = OTHER; note = uracil
  modified_base 26: mod_base = OTHER; note = uracil
  source 1..30: mol_type = other DNA
gagaggtagatgctgtaattgctgatacaa

SEQ ID NO: 707 - DNA, 29 bp, synthetic construct
  misc_feature 1..29: note = Synthetic DNA primer, R335
  modified_base 14: mod_base = OTHER; note = uracil
  modified_base 28: mod_base = OTHER; note = uracil
  source 1..29: mol_type = other DNA
gacaaacacctcctgataaattggctttg

SEQ ID NO: 708 - DNA, 23 bp, synthetic construct
  misc_feature 1..23: note = Synthetic DNA primer, R336
  modified_base 9: mod_base = OTHER; note = uracil
  modified_base 19: mod_base = OTHER; note = uracil
  source 1..23: mol_type = other DNA
gaccctactccaaggagctcagg

SEQ ID NO: 709 - DNA, 30 bp, synthetic construct
  misc_feature 1..30: note = Synthetic DNA primer, R337
  modified_base 9: mod_base = OTHER; note = uracil
  modified_base 23: mod_base = OTHER; note = uracil
  source 1..30: mol_type = other DNA
gacccagttaccataactactctgagaaaa

SEQ ID NO: 710 - DNA, 25 bp, synthetic construct
  misc_feature 1..25: note = Synthetic DNA primer, R338
  modified_base 13: mod_base = OTHER; note = uracil
  modified_base 20: mod_base = OTHER; note = uracil
  source 1..25: mol_type = other DNA
gacttgcagagctatcccctaaagc

SEQ ID NO: 711 - DNA, 21 bp, synthetic construct
  misc_feature 1..21: note = Synthetic DNA primer, R339
  modified_base 14: mod_base = OTHER; note = uracil
  modified_base 20: mod_base = OTHER; note = uracil
  source 1..21: mol_type = other DNA
gagctgcaccgagtcgtagtc

SEQ ID NO: 712 - DNA, 21 bp, synthetic construct
  misc_feature 1..21: note = Synthetic DNA primer, R340
  modified_base 7: mod_base = OTHER; note = uracil
  modified_base 12: mod_base = OTHER; note = uracil
  source 1..21: mol_type = other DNA
gagtcgttgtctccccgaagg

SEQ ID NO: 713 - DNA, 30 bp, synthetic construct
  misc_feature 1..30: note = Synthetic DNA primer, R341
  modified_base 12: mod_base = OTHER; note = uracil
  modified_base 28: mod_base = OTHER; note = uracil
  source 1..30: mol_type = other DNA
gaatacagtcctggatgatgatgtttttga

SEQ ID NO: 714 - DNA, 26 bp, synthetic construct
  misc_feature 1..26: note = Synthetic DNA primer, R342
  modified_base 15: mod_base = OTHER; note = uracil
  modified_base 22: mod_base = OTHER; note = uracil
  source 1..26: mol_type = other DNA
gaggacaagaaaagtgcaacttccca

SEQ ID NO: 715 - DNA, 27 bp, synthetic construct
  misc_feature 1..27: note = Synthetic DNA primer, R343
  modified_base 11: mod_base = OTHER; note = uracil
  modified_base 20: mod_base = OTHER; note = uracil
  source 1..27: mol_type = other DNA
gatttcattgttttccaactccgggat

SEQ ID NO: 716 - DNA, 30 bp, synthetic construct
  misc_feature 1..30: note = Synthetic DNA primer, R344
  modified_base 5: mod_base = OTHER; note = uracil
  modified_base 20: mod_base = OTHER; note = uracil
  source 1..30: mol_type = other DNA
gatttccacagaaacaacatcgatttcttc

SEQ ID NO: 717 - DNA, 30 bp, synthetic construct
  misc_feature 1..30: note = Synthetic DNA primer, R345
  modified_base 9: mod_base = OTHER; note = uracil
  modified_base 21: mod_base = OTHER; note = uracil
  source 1..30: mol_type = other DNA
gatgcatttgatcatgcatttgaaacaagt

SEQ ID NO: 718 - DNA, 19 bp, synthetic construct
  misc_feature 1..19: note = Synthetic DNA primer, R346
  modified_base 9: mod_base = OTHER; note = uracil
  modified_base 17: mod_base = OTHER; note = uracil
  source 1..19: mol_type = other DNA
gaagtctgtgcgcgcttgc

SEQ ID NO: 719 - DNA, 19 bp, synthetic construct
  misc_feature 1..19: note = Synthetic DNA primer, R347
  modified_base 12: mod_base = OTHER; note = uracil
  modified_base 18: mod_base = OTHER; note = uracil
  source 1..19: mol_type = other DNA
gagtgcgcacgtcgcaatc

SEQ ID NO: 720 - DNA, 26 bp, synthetic construct
  misc_feature 1..26: note = Synthetic DNA primer, R348
  modified_base 10: mod_base = OTHER; note = uracil
  modified_base 25: mod_base = OTHER; note = uracil
  source 1..26: mol_type = other DNA
gaggatgtatacaaaaggcggatgtg

SEQ ID NO: 721 - DNA, 22 bp, synthetic construct
  misc_feature 1..22: note = Synthetic DNA primer, R349
  modified_base 12: mod_base = OTHER; note = uracil
  modified_base 18: mod_base = OTHER; note = uracil
  source 1..22: mol_type = other DNA
gagccagagagtccctttcacc

SEQ ID NO: 722 - DNA, 23 bp, synthetic construct
  misc_feature 1..23: note = Synthetic DNA primer, R350
  modified_base 11: mod_base = OTHER; note = uracil
  modified_base 22: mod_base = OTHER; note = uracil
  source 1..23: mol_type = other DNA
gatgccactctttgggttgagtt

SEQ ID NO: 723 - DNA, 27 bp, synthetic construct
  misc_feature 1..27: note = Synthetic DNA primer, R351
  modified_base 11: mod_base = OTHER; note = uracil
  modified_base 21: mod_base = OTHER; note = uracil
  source 1..27: mol_type = other DNA
gatttcaaactggaggcttatcaccaa

SEQ ID NO: 724 - DNA, 35 bp, synthetic construct
  misc_feature 1..35: note = Synthetic DNA primer, R352
  modified_base 18: mod_base = OTHER; note = uracil
  modified_base 33: mod_base = OTHER; note = uracil
  source 1..35: mol_type = other DNA
gaatacaagcatgaaaatcaaaacatatcttctgc

SEQ ID NO: 725 - DNA, 34 bp, synthetic construct
  misc_feature 1..34: note = Synthetic DNA primer, R353
  modified_base 16: mod_base = OTHER; note = uracil
  modified_base 33: mod_base = OTHER; note = uracil
  source 1..34: mol_type = other DNA
gagtaaatggtagcttttatcataatcaccagtc

SEQ ID NO: 726 - DNA, 28 bp, synthetic construct
  misc_feature 1..28: note = Synthetic DNA primer, R354
  modified_base 15: mod_base = OTHER; note = uracil
  modified_base 27: mod_base = OTHER; note = uracil
  source 1..28: mol_type = other DNA
gatccattcaagactttagcaggtggta

SEQ ID NO: 727 - DNA, 32 bp, synthetic construct
  misc_feature 1..32: note = Synthetic DNA primer, R355
  modified_base 15: mod_base = OTHER; note = uracil
  modified_base 30: mod_base = OTHER; note = uracil
  source 1..32: mol_type = other DNA
gagttactctcatgtgagaaccatttgaatga

SEQ ID NO: 728 - DNA, 35 bp, synthetic construct
  misc_feature 1..35: note = Synthetic DNA primer, R356
  modified_base 15: mod_base = OTHER; note = uracil
  modified_base 32: mod_base = OTHER; note = uracil
  source 1..35: mol_type = other DNA
gagtttttcttatctcttaaaatgtttctgctaca

SEQ ID NO: 729 - DNA, 28 bp, synthetic construct
  misc_feature 1..28: note = Synthetic DNA primer, R257
  modified_base 7: mod_base = OTHER; note = uracil
  modified_base 14: mod_base = OTHER; note = uracil
  source 1..28: mol_type = other DNA
gaaaggtacaagttaaggcacacagaag

SEQ ID NO: 730 - DNA, 27 bp, synthetic construct
  misc_feature 1..27: note = Synthetic DNA primer, R358
  modified_base 10: mod_base = OTHER; note = uracil
  modified_base 21: mod_base = OTHER; note = uracil
  source 1..27: mol_type = other DNA
gatggatcttggcacaatgataacagg

SEQ ID NO: 731 - DNA, 32 bp, synthetic construct
  misc_feature 1..32: note = Synthetic DNA primer, R359
  modified_base 17: mod_base = OTHER; note = uracil
  modified_base 30: mod_base = OTHER; note = uracil
  source 1..32: mol_type = other DNA
gatgctatagtaccagtaccttttaaggttca

SEQ ID NO: 732 - DNA, 23 bp, synthetic construct
  misc_feature 1..23: note = Synthetic DNA primer, R360
  modified_base 11: mod_base = OTHER; note = uracil
  modified_base 21: mod_base = OTHER; note = uracil
  source 1..23: mol_type = other DNA
gaccgtaaggtggcctactttgc

SEQ ID NO: 733 - DNA, 31 bp, synthetic construct
  misc_feature 1..31: note = Synthetic DNA primer, R361
  modified_base 13: mod_base = OTHER; note = uracil
  modified_base 28: mod_base = OTHER; note = uracil
  source 1..31: mol_type = other DNA
gacagcgttttcttgtattcctgtatttagc

SEQ ID NO: 734 - DNA, 27 bp, synthetic construct
  misc_feature 1..27: note = Synthetic DNA primer, R362
  modified_base 14: mod_base = OTHER; note = uracil
  modified_base 26: mod_base = OTHER; note = uracil
  source 1..27: mol_type = other DNA
gaggaactgtgaatgaacttgtaggtg

SEQ ID NO: 735 - RNA, 20 nt, synthetic construct
  misc_feature 1..20: note = Synthetic Primer, R363
  source 1..20: mol_type = other RNA
gacctgaccagggcgtcaaa

SEQ ID NO: 736 - DNA, 29 bp, synthetic construct
  misc_feature 1..29: note = Synthetic DNA primer, R364
  modified_base 12: mod_base = OTHER; note = uracil
  modified_base 26: mod_base = OTHER; note = uracil
  source 1..29: mol_type = other DNA
gaagttcatcttcgaagctcaaatttcag

SEQ ID NO: 737 - DNA, 31 bp, synthetic construct
  misc_feature 1..31: note = Synthetic DNA primer, R365
  modified_base 13: mod_base = OTHER; note = uracil
  modified_base 25: mod_base = OTHER; note = uracil
  source 1..31: mol_type = other DNA
gatacaacaaaatgtttgacttcatgcaggt

SEQ ID NO: 738 - DNA, 28 bp, synthetic construct
  misc_feature 1..28: note = Synthetic DNA primer, F366
  modified_base 12: mod_base = OTHER; note = uracil
  modified_base 26: mod_base = OTHER; note = uracil
  source 1..28: mol_type = other DNA
aaaactcagtatcaacaactaccggtac

SEQ ID NO: 739 - DNA, 28 bp, synthetic construct
  misc_feature 1..28: note = Synthetic DNA primer, F367
  modified_base 9: mod_base = OTHER; note = uracil
  modified_base 25: mod_base = OTHER; note = uracil
  source 1..28: mol_type = other DNA
ctcagaaatggaaaaaacctgcagtaaa

SEQ ID NO: 740 - DNA, 23 bp, synthetic construct
  misc_feature 1..23: note = Synthetic DNA primer, F368
  modified_base 9: mod_base = OTHER; note = uracil
  modified_base 21: mod_base = OTHER; note = uracil
  source 1..23: mol_type = other DNA
gttccctctgcgtgttctcataa

SEQ ID NO: 741 - DNA, 27 bp, synthetic construct
  misc_feature 1..27: note = Synthetic DNA primer, F369
  modified_base 10: mod_base = OTHER; note = uracil
  modified_base 22: mod_base = OTHER; note = uracil
  source 1..27: mol_type = other DNA
aagaacctgtgtgaaagtatctagcac

SEQ ID NO: 742 - RNA, 25 nt, synthetic construct
  misc_feature 1..25: note = Synthetic Primer, F370
  source 1..25: mol_type = other RNA
ataaaccaaacccatgcaaaaggac

SEQ ID NO: 743 - DNA, 25 bp, synthetic construct
  misc_feature 1..25: note = Synthetic DNA primer, F371
  modified_base 8: mod_base = OTHER; note = uracil
  modified_base 22: mod_base = OTHER; note = uracil
  source 1..25: mol_type = other DNA
gcattgatggaaggaagcaaataca

SEQ ID NO: 744 - DNA, 25 bp, synthetic construct
  misc_feature 1..25: note = Synthetic DNA primer, F372
  modified_base 10: mod_base = OTHER; note = uracil
  modified_base 23: mod_base = OTHER; note = uracil
  source 1..25: mol_type = other DNA
ccagcttcatagacaaaggttctct

SEQ ID NO: 745 - DNA, 24 bp, synthetic construct
  misc_feature 1..24: note = Synthetic DNA primer, F373
  modified_base 10: mod_base = OTHER; note = uracil
  modified_base 23: mod_base = OTHER; note = uracil
  source 1..24: mol_type = other DNA
gtggtttcttccattgaccacatc

SEQ ID NO: 746 - DNA, 22 bp, synthetic construct
  misc_feature 1..22: note = Synthetic DNA primer, F374
  modified_base 5: mod_base = OTHER; note = uracil
  modified_base 18: mod_base = OTHER; note = uracil
  source 1..22: mol_type = other DNA
caaatgggcaggactcttaggt

SEQ ID NO: 747 - DNA, 22 bp, synthetic construct
  misc_feature 1..22: note = Synthetic DNA primer, F375
  modified_base 2: mod_base = OTHER; note = uracil
  modified_base 12: mod_base = OTHER; note = uracil
  source 1..22: mol_type = other DNA
gtgaggaaacttctgcagaggt

SEQ ID NO: 748 - DNA, 22 bp, synthetic construct
  misc_feature 1..22: note = Synthetic DNA primer, F376
  modified_base 15: mod_base = OTHER; note = uracil
  modified_base 21: mod_base = OTHER; note = uracil
  source 1..22: mol_type = other DNA
ggaagcagggaagctcttcatc

SEQ ID NO: 749 - DNA, 27 bp, synthetic construct
  misc_feature 1..27: note = Synthetic DNA primer, F377
  modified_base 6: mod_base = OTHER; note = uracil
  modified_base 19: mod_base = OTHER; note = uracil
  source 1..27: mol_type = other DNA
tggtttgaagaactttcttcagaagct

SEQ ID NO: 750 - DNA, 25 bp, synthetic construct
  misc_feature 1..25: note = Synthetic DNA primer, F378
  modified_base 9: mod_base = OTHER; note = uracil
  modified_base 11: mod_base = OTHER; note = uracil
  source 1..25: mol_type = other DNA
agggagactgtgtgtaatatttgcg

SEQ ID NO: 751 - DNA, 30 bp, synthetic construct
  misc_feature 1..30: note = Synthetic DNA primer, F379
  modified_base 9: mod_base = OTHER; note = uracil
  modified_base 25: mod_base = OTHER; note = uracil
  source 1..30: mol_type = other DNA
gccagtattgaagaatgttgaagatcaaaa

SEQ ID NO: 752 - DNA, 23 bp, synthetic construct
  misc_feature 1..23: note = Synthetic DNA primer, F380
  modified_base 13: mod_base = OTHER; note = uracil
  modified_base 19: mod_base = OTHER; note = uracil
  source 1..23: mol_type = other DNA
gccaaaaggaagtctgtttccac

SEQ ID NO: 753 - DNA, 27 bp, synthetic construct
  misc_feature 1..27: note = Synthetic DNA primer, F381
  modified_base 12: mod_base = OTHER; note = uracil
  modified_base 25: mod_base = OTHER; note = uracil
  source 1..27: mol_type = other DNA
catgccacacattctctttttacatgt

SEQ ID NO: 754 - DNA, 23 bp, synthetic construct
  misc_feature 1..23: note = Synthetic DNA primer, F382
  modified_base 7: mod_base = OTHER; note = uracil
  modified_base 17: mod_base = OTHER; note = uracil
  source 1..23: mol_type = other DNA
gtagagtgctacactgtccaaca

SEQ ID NO: 755 - DNA, 28 bp, synthetic construct
  misc_feature 1..28: note = Synthetic DNA primer, F383
  modified_base 14: mod_base = OTHER; note = uracil
  modified_base 25: mod_base = OTHER; note = uracil
  source 1..28: mol_type = other DNA
ctctgagaaagaatgaaatggagttgga

SEQ ID NO: 756 - DNA, 24 bp, synthetic construct
  misc_feature 1..24: note = Synthetic DNA primer, F384
  modified_base 11: mod_base = OTHER; note = uracil
  modified_base 22: mod_base = OTHER; note = uracil
  source 1..24: mol_type = other DNA
aaacaaattttccagcgcttctga

SEQ ID NO: 757 - DNA, 30 bp, synthetic construct
  misc_feature 1..30: note = Synthetic DNA primer, F385
  modified_base 14: mod_base = OTHER; note = uracil
  modified_base 28: mod_base = OTHER; note = uracil
  source 1..30: mol_type = other DNA
agcaataaaagtgtataaatgcctgtatgc

SEQ ID NO: 758 - DNA, 30 bp, synthetic construct
  misc_feature 1..30: note = Synthetic DNA primer, F386
  modified_base 14: mod_base = OTHER; note = uracil
  modified_base 28: mod_base = OTHER; note = uracil
  source 1..30: mol_type = other DNA
tcaacaagttgactaaatctcgtactttct

SEQ ID NO: 759 - DNA, 28 bp, synthetic construct
  misc_feature 1..28: note = Synthetic DNA primer, F387
  modified_base 11: mod_base = OTHER; note = uracil
  modified_base 23: mod_base = OTHER; note = uracil
  source 1..28: mol_type = other DNA
cattcttacataaaggacactgtgaagg

SEQ ID NO: 760 - DNA, 24 bp, synthetic construct
  misc_feature 1..24: note = Synthetic DNA primer, F388
  modified_base 11: mod_base = OTHER; note = uracil
  modified_base 21: mod_base = OTHER; note = uracil
  source 1..24: mol_type = other DNA
cccttacagatggagtcttttggc

SEQ ID NO: 761 - DNA, 27 bp, synthetic construct
  misc_feature 1..27: note = Synthetic DNA primer, F389
  modified_base 11: mod_base = OTHER; note = uracil
  modified_base 24: mod_base = OTHER; note = uracil
  source 1..27: mol_type = other DNA
aaagaccttttggtaactcagactcag

SEQ ID NO: 762 - DNA, 32 bp, synthetic construct
  misc_feature 1..32: note = Synthetic DNA primer, F390
  modified_base 9: mod_base = OTHER; note = uracil
  modified_base 16: mod_base = OTHER; note = uracil
  source 1..32: mol_type = other DNA
acattcactgaaaattgtaaagcctataattg

SEQ ID NO: 763 - DNA, 35 bp, synthetic construct
  misc_feature 1..35: note = Synthetic DNA primer, F391
  modified_base 13: mod_base = OTHER; note = uracil
  modified_base 32: mod_base = OTHER; note = uracil
  source 1..35: mol_type = other DNA
ggttgtgctttttaaatttcaattttatttttgct

SEQ ID NO: 764 - DNA, 19 bp, synthetic construct
  misc_feature 1..19: note = Synthetic DNA primer, F392
  modified_base 6: mod_base = OTHER; note = uracil
  modified_base 15: mod_base = OTHER; note = uracil
  source 1..19: mol_type = other DNA
ggatgtcacaaccgtgtgg

SEQ ID NO: 765 - DNA, 29 bp, synthetic construct
  misc_feature 1..29: note = Synthetic DNA primer, F393
  modified_base 10: mod_base = OTHER; note = uracil
  modified_base 19: mod_base = OTHER; note = uracil
  source 1..29: mol_type = other DNA
agtgaaaactaaaatggatcaagcagatg

SEQ ID NO: 766 - DNA, 33 bp, synthetic construct
  misc_feature 1..33: note = Synthetic DNA primer, F394
  modified_base 12: mod_base = OTHER; note = uracil
  modified_base 23: mod_base = OTHER; note = uracil
  source 1..33: mol_type = other DNA
aaactagtttttgccagttttttaaaataacct

SEQ ID NO: 767 - DNA, 23 bp, synthetic construct
  misc_feature 1..23: note = Synthetic DNA primer, F395
  modified_base 14: mod_base = OTHER; note = uracil
  modified_base 21: mod_base = OTHER; note = uracil
  source 1..23: mol_type = other DNA
tttttacccccagtggtatgtgg

SEQ ID NO: 768 - RNA, 27 nt, synthetic construct
  misc_feature 1..27: note = Synthetic Primer, F396
  source 1..27: mol_type = other RNA
gaaaacacaaatcaaagagaagctgca

SEQ ID NO: 769 - DNA, 28 bp, synthetic construct
  misc_feature 1..28: note = Synthetic DNA primer, F397
  modified_base 9: mod_base = OTHER; note = uracil
  modified_base 21: mod_base = OTHER; note = uracil
  source 1..28: mol_type = other DNA
atatttagtagccaggacagtagaagga

SEQ ID NO: 770 - DNA, 28 bp, synthetic construct
  misc_feature 1..28: note = Synthetic DNA primer, F398
  modified_base 12: mod_base = OTHER; note = uracil
  modified_base 19: mod_base = OTHER; note = uracil
  source 1..28: mol_type = other DNA
aaatatttcagtgtccgttcacacacaa

SEQ ID NO: 771 - DNA, 25 bp, synthetic construct
  misc_feature 1..25: note = Synthetic DNA primer, F399
  modified_base 6: mod_base = OTHER; note = uracil
  modified_base 20: mod_base = OTHER; note = uracil
  source 1..25: mol_type = other DNA
gcagatgcaaggtattctgtaaagg

SEQ ID NO: 772 - DNA, 30 bp, synthetic construct
  misc_feature 1..30: note = Synthetic DNA primer, F400
  modified_base 14: mod_base = OTHER; note = uracil
  modified_base 28: mod_base = OTHER; note = uracil
  source 1..30: mol_type = other DNA
acctacataaaactctttccagaatgttgt

SEQ ID NO: 773 - DNA, 25 bp, synthetic construct
  misc_feature 1..25: note = Synthetic DNA primer, F401
  modified_base 11: mod_base = OTHER; note = uracil
  modified_base 24: mod_base = OTHER; note = uracil
  source 1..25: mol_type = other DNA
ccctttctgttgaagctgtcaattc

SEQ ID NO: 774 - DNA, 23 bp, synthetic construct
  misc_feature 1..23: note = Synthetic DNA primer, F402
  modified_base 4: mod_base = OTHER; note = uracil
  modified_base 12: mod_base = OTHER; note = uracil
  source 1..23: mol_type = other DNA
agatggtatgttgccaacacgag

SEQ ID NO: 775 - DNA, 23 bp, synthetic construct
  misc_feature 1..23: note = Synthetic DNA primer, F403
  modified_base 11: mod_base = OTHER; note = uracil
  modified_base 21: mod_base = OTHER; note = uracil
  source 1..23: mol_type = other DNA
gatgtttccgtcaaatcgtgtgg

SEQ ID NO: 776 - DNA, 27 bp, synthetic construct
  misc_feature 1..27: note = Synthetic DNA primer, F404
  modified_base 12: mod_base = OTHER; note = uracil
  modified_base 22: mod_base = OTHER; note = uracil
  source 1..27: mol_type = other DNA
gtagaactatctgcagacacctcaaac

SEQ ID NO: 777 - DNA, 27 bp, synthetic construct
  misc_feature 1..27: note = Synthetic DNA primer, F405
  modified_base 13: mod_base = OTHER; note = uracil
  modified_base 26: mod_base = OTHER; note = uracil
  source 1..27: mol_type = other DNA
ccagaaccaccatctttcagtaatttg

SEQ ID NO: 778 - DNA, 27 bp, synthetic construct
  misc_feature 1..27: note = Synthetic DNA primer, F406
  modified_base 13: mod_base = OTHER; note = uracil
  modified_base 26: mod_base = OTHER; note = uracil
  source 1..27: mol_type = other DNA
atcataaaatgttggagctaggtcctt

SEQ ID NO: 779 - DNA, 27 bp, synthetic construct
  misc_feature 1..27: note = Synthetic DNA primer, F407
  modified_base 14: mod_base = OTHER; note = uracil
  modified_base 21: mod_base = OTHER; note = uracil
  source 1..27: mol_type = other DNA
tatgatggaagggtagctgttagaagg

SEQ ID NO: 780 - DNA, 28 bp, synthetic construct
  misc_feature 1..28: note = Synthetic DNA primer, F408
  modified_base 15: mod_base = OTHER; note = uracil
  modified_base 25: mod_base = OTHER; note = uracil
  source 1..28: mol_type = other DNA
ggttaaaatgtcactctgagaggatagc

SEQ ID NO: 781 - DNA, 27 bp, synthetic construct
  misc_feature 1..27: note = Synthetic DNA primer, F409
  modified_base 10: mod_base = OTHER; note = uracil
  modified_base 20: mod_base = OTHER; note = uracil
  source 1..27: mol_type = other DNA
ggaaatttgtaaaatgtgctccccaaa

SEQ ID NO: 782 - DNA, 25 bp, synthetic construct
  misc_feature 1..25: note = Synthetic DNA primer, F410
  modified_base 14: mod_base = OTHER; note = uracil
  modified_base 24: mod_base = OTHER; note = uracil
  source 1..25: mol_type = other DNA
aattccttgtcactcagaccaactc

SEQ ID NO: 783 - DNA, 24 bp, synthetic construct
  misc_feature 1..24: note = Synthetic DNA primer, F411
  modified_base 11: mod_base = OTHER; note = uracil
  modified_base 22: mod_base = OTHER; note = uracil
  source 1..24: mol_type = other DNA
actaaggtgatgttcctgagatgc

SEQ ID NO: 784 - DNA, 30 bp, synthetic construct
  misc_feature 1..30: note = Synthetic DNA primer, F412
  modified_base 8: mod_base = OTHER; note = uracil
  modified_base 20: mod_base = OTHER; note = uracil
  source 1..30: mol_type = other DNA
actttccttaatgtcattttcagcaaaact

SEQ ID NO: 785 - DNA, 30 bp, synthetic construct
  misc_feature 1..30: note = Synthetic DNA primer, F413
  modified_base 11: mod_base = OTHER; note = uracil
  modified_base 27: mod_base = OTHER; note = uracil
  source 1..30: mol_type = other DNA
cagtctgaactacttcttcatattcttgct

SEQ ID NO: 786 - DNA, 28 bp, synthetic construct
  misc_feature 1..28: note = Synthetic DNA primer, F414
  modified_base 11: mod_base = OTHER; note = uracil
  modified_base 24: mod_base = OTHER; note = uracil
  source 1..28: mol_type = other DNA
ctagttctgcttgaatgttttcatcact

SEQ ID NO: 787 - DNA, 28 bp, synthetic construct
  misc_feature 1..28: note = Synthetic DNA primer, F415
  modified_base 14: mod_base = OTHER; note = uracil
  modified_base 27: mod_base = OTHER; note = uracil
  source 1..28: mol_type = other DNA
tggaatgttctcatttcccatttctctt

SEQ ID NO: 788 - DNA, 24 bp, synthetic construct
  misc_feature 1..24: note = Synthetic DNA primer, F416
  modified_base 8: mod_base = OTHER; note = uracil
  modified_base 19: mod_base = OTHER; note = uracil
  source 1..24: mol_type = other DNA
gtttcgttgcctctgaactgagat

SEQ ID NO: 789 - DNA, 30 bp, synthetic construct
  misc_feature 1..30: note = Synthetic DNA primer, F417
  modified_base 13: mod_base = OTHER; note = uracil
  modified_base 28: mod_base = OTHER; note = uracil
  source 1..30: mol_type = other DNA
ccttgattttcttccttttgttcacattca

SEQ ID NO: 790 - DNA, 24 bp, synthetic construct
  misc_feature 1..24: note = Synthetic DNA primer, F418
  modified_base 11: mod_base = OTHER; note = uracil
  modified_base 22: mod_base = OTHER; note = uracil
  source 1..24: mol_type = other DNA
tttctatgcttgtttcccgactgt

SEQ ID NO: 791 - DNA, 24 bp, synthetic construct
  misc_feature 1..24: note = Synthetic DNA primer, F419
  modified_base 3: mod_base = OTHER; note = uracil
  modified_base 14: mod_base = OTHER; note = uracil
  source 1..24: mol_type = other DNA
gatgaaagctccttcaccacagaa

SEQ ID NO: 792 - DNA, 25 bp, synthetic construct
  misc_feature 1..25: note = Synthetic DNA primer, F420
  modified_base 11: mod_base = OTHER; note = uracil
  modified_base 21: mod_base = OTHER; note = uracil
  source 1..25: mol_type = other DNA
cctagagtgctaacttccagtaacg

SEQ ID NO: 793 - DNA, 27 bp, synthetic construct
  misc_feature 1..27: note = Synthetic DNA primer, F421
  modified_base 11: mod_base = OTHER; note = uracil
  modified_base 25: mod_base = OTHER; note = uracil
  source 1..27: mol_type = other DNA
cttggaaggctaggattgacaaattct

SEQ ID NO: 794 - DNA, 25 bp, synthetic construct
  misc_feature 1..25: note = Synthetic DNA primer, F422
  modified_base 13: mod_base = OTHER; note = uracil
  modified_base 24: mod_base = OTHER; note = uracil
  source 1..25: mol_type = other DNA
ttgttactcttcttggctccagttg

SEQ ID NO: 795 - DNA, 27 bp, synthetic construct
  misc_feature 1..27: note = Synthetic DNA primer, F423
  modified_base 11: mod_base = OTHER; note = uracil
  modified_base 23: mod_base = OTHER; note = uracil
  source 1..27: mol_type = other DNA
ttaggtgggcttagatttctactgact

SEQ ID NO: 796 - DNA, 26 bp, synthetic construct
  misc_feature 1..26: note = Synthetic DNA primer, F424
  modified_base 12: mod_base = OTHER; note = uracil
  modified_base 25: mod_base = OTHER; note = uracil
  source 1..26: mol_type = other DNA
tgcttataggttcagctttcgttttg

SEQ ID NO: 797 - DNA, 24 bp, synthetic construct
  misc_feature 1..24: note = Synthetic DNA primer, F425
  modified_base 9: mod_base = OTHER; note = uracil
  modified_base 21: mod_base = OTHER; note = uracil
  source 1..24: mol_type = other DNA
ccactatgtaagacaaaggctggt

SEQ ID NO: 798 - DNA, 27 bp, synthetic construct
  misc_feature 1..27: note = Synthetic DNA primer, F426
  modified_base 11: mod_base = OTHER; note = uracil
  modified_base 26: mod_base = OTHER; note = uracil
  source 1..27: mol_type = other DNA
tccgtttggttagttccctgatttatc

SEQ ID NO: 799 - DNA, 28 bp, synthetic construct
  misc_feature 1..28: note = Synthetic DNA primer, F427
  modified_base 11: mod_base = OTHER; note = uracil
  modified_base 26: mod_base = OTHER; note = uracil
  source 1..28: mol_type = other DNA
gtattatctgtggctcagtaacaaatgc

SEQ ID NO: 800 - DNA, 24 bp, synthetic construct
  misc_feature 1..24: note = Synthetic DNA primer, F428
  modified_base 12: mod_base = OTHER; note = uracil
  modified_base 22: mod_base = OTHER; note = uracil
  source 1..24: mol_type = other DNA
ttaaagcctcatgaggatcactgg

SEQ ID NO: 801 - DNA, 26 bp, synthetic construct
  misc_feature 1..26: note = Synthetic DNA primer, F429
  modified_base 12: mod_base = OTHER; note = uracil
  modified_base 25: mod_base = OTHER; note = uracil
  source 1..26: mol_type = other DNA
agttcatcacttctggaaaaccactc

SEQ ID NO: 802 - DNA, 27 bp, synthetic construct
  misc_feature 1..27: note = Synthetic DNA primer, F430
  modified_base 12: mod_base = OTHER; note = uracil
  modified_base 26: mod_base = OTHER; note = uracil
  source 1..27: mol_type = other DNA
gggatcagcattcagatctaccttttt

SEQ ID NO: 803 - DNA, 28 bp, synthetic construct
  misc_feature 1..28: note = Synthetic DNA primer, F431
  modified_base 13: mod_base = OTHER; note = uracil
  modified_base 26: mod_base = OTHER; note = uracil
  source 1..28: mol_type = other DNA
ttcagccttttctacattcattctgtct

SEQ ID NO: 804 - DNA, 25 bp, synthetic construct
  misc_feature 1..25: note = Synthetic DNA primer, F432
  modified_base 9: mod_base = OTHER; note = uracil
  modified_base 21: mod_base = OTHER; note = uracil
  source 1..25: mol_type = other DNA
taccctgatacttttctggatgcct

SEQ ID NO: 805 - DNA, 26 bp, synthetic construct
  misc_feature 1..26: note = Synthetic DNA primer, F433
  modified_base 11: mod_base = OTHER; note = uracil
  modified_base 23: mod_base = OTHER; note = uracil
  source 1..26: mol_type = other DNA
gaatccaaactgatttcatccctggt

SEQ ID NO: 806 - DNA, 27 bp, synthetic construct
  misc_feature 1..27: note = Synthetic DNA primer, F434
  modified_base 8: mod_base = OTHER; note = uracil
  modified_base 26: mod_base = OTHER; note = uracil
  source 1..27: mol_type = other DNA
agctgcctaccacaaatacaaattatg

SEQ ID NO: 807 - DNA, 26 bp, synthetic construct
  misc_feature 1..26: note = Synthetic DNA primer, F435
  modified_base 9: mod_base = OTHER; note = uracil
  modified_base 24: mod_base = OTHER; note = uracil
  source 1..26: mol_type = other DNA
cagagttctcacagttccaaggttag

SEQ ID NO: 808 - DNA, 31 bp, synthetic construct
  misc_feature 1..31: note = Synthetic DNA primer, F436
  modified_base 19: mod_base = OTHER; note = uracil
  modified_base 25: mod_base = OTHER; note = uracil
  source 1..31: mol_type = other DNA
gaagaagaagaaaacaaatggttttaccaag

SEQ ID NO: 809 - DNA, 28 bp, synthetic construct
  misc_feature 1..28: note = Synthetic DNA primer, F437
  modified_base 13: mod_base = OTHER; note = uracil
  modified_base 26: mod_base = OTHER; note = uracil
  source 1..28: mol_type = other DNA
atcaccacgtcatagaaagtaattgtgc

SEQ ID NO: 810 - DNA, 30 bp, synthetic construct
  misc_feature 1..30: note = Synthetic DNA primer, F438
  modified_base 15: mod_base = OTHER; note = uracil
  modified_base 29: mod_base = OTHER; note = uracil
  source 1..30: mol_type = other DNA
cattcaaacttacttgcaaaatatgtggtc

SEQ ID NO: 811 - DNA, 31 bp, synthetic construct
  misc_feature 1..31: note = Synthetic DNA primer, F439
  modified_base 14: mod_base = OTHER; note = uracil
  modified_base 30: mod_base = OTHER; note = uracil
  source 1..31: mol_type = other DNA
gcataggagataatcataggaatcccaaatt

SEQ ID NO: 812 - DNA, 30 bp, synthetic construct
  misc_feature 1..30: note = Synthetic DNA primer, F440
  modified_base 13: mod_base = OTHER; note = uracil
  modified_base 27: mod_base = OTHER; note = uracil
  source 1..30: mol_type = other DNA
agttgtagttgttgaattcagtatcatcct

SEQ ID NO: 813 - DNA, 28 bp, synthetic construct
  misc_feature 1..28: note = Synthetic DNA primer, F441
  modified_base 12: mod_base = OTHER; note = uracil
  modified_base 27: mod_base = OTHER; note = uracil
  source 1..28: mol_type = other DNA
tgtgcctttcctaaggaatttgctaata

SEQ ID NO: 814 - DNA, 28 bp, synthetic construct
  misc_feature 1..28: note = Synthetic DNA primer, F442
  modified_base 10: mod_base = OTHER; note = uracil
  modified_base 20: mod_base = OTHER; note = uracil
  source 1..28: mol_type = other DNA
aaaagataatggaaagggatgacacagc

SEQ ID NO: 815 - DNA, 24 bp, synthetic construct
  misc_feature 1..24: note = Synthetic DNA primer, F443
  modified_base 15: mod_base = OTHER; note = uracil
  modified_base 23: mod_base = OTHER; note = uracil
  source 1..24: mol_type = other DNA
ctgttaaggcccagttagatcctc

SEQ ID NO: 816 - DNA, 28 bp, synthetic construct
  misc_feature 1..28: note = Synthetic DNA primer, F444
  modified_base 10: mod_base = OTHER; note = uracil
  modified_base 27: mod_base = OTHER; note = uracil
  source 1..28: mol_type = other DNA
aggcagttctagaagaatgaaaactctt

SEQ ID NO: 817 - DNA, 24 bp, synthetic construct
  misc_feature 1..24: note = Synthetic DNA primer, F445
  modified_base 12: mod_base = OTHER; note = uracil
  modified_base 22: mod_base = OTHER; note = uracil
  source 1..24: mol_type = other DNA
tgtacctagcattctgcctcatac

SEQ ID NO: 818 - DNA, 25 bp, synthetic construct
  misc_feature 1..25: note = Synthetic DNA primer, F446
  modified_base 13: mod_base = OTHER; note = uracil
  modified_base 23: mod_base = OTHER; note = uracil
  source 1..25: mol_type = other DNA
tagaccttttcctctgcccttatca

SEQ ID NO: 819 - DNA, 28 bp, synthetic construct
  misc_feature 1..28: note = Synthetic DNA primer, F447
  modified_base 6: mod_base = OTHER; note = uracil
  modified_base 18: mod_base = OTHER; note = uracil
  source 1..28: mol_type = other DNA
cacattattacagtggatggagaagaca

SEQ ID NO: 820 - DNA, 26 bp, synthetic construct
  misc_feature 1..26: note = Synthetic DNA primer, F448
  modified_base 11: mod_base = OTHER; note = uracil
  modified_base 25: mod_base = OTHER; note = uracil
  source 1..26: mol_type = other DNA
cttctttgggtgttttatgcttggtt

SEQ ID NO: 821 - DNA, 25 bp, synthetic construct
  misc_feature 1..25: note = Synthetic DNA primer, F449
  modified_base 9: mod_base = OTHER; note = uracil
  modified_base 20: mod_base = OTHER; note = uracil
  source 1..25: mol_type = other DNA
gcagagctttatgaagcagtgaaga

SEQ ID NO: 822 - DNA, 28 bp, synthetic construct
  misc_feature 1..28: note = Synthetic DNA primer, F450
  modified_base 11: mod_base = OTHER; note = uracil
  modified_base 24: mod_base = OTHER; note = uracil
  source 1..28: mol_type = other DNA
tcttaaatggtcacagggttatttcagt

SEQ ID NO: 823 - DNA, 27 bp, synthetic construct
  misc_feature 1..27: note = Synthetic DNA primer, F451
  modified_base 13: mod_base = OTHER; note = uracil
  modified_base 26: mod_base = OTHER; note = uracil
  source 1..27: mol_type = other DNA
ttccattgcatctttctcatctttctc

SEQ ID NO: 824 - DNA, 29 bp, synthetic construct
  misc_feature 1..29: note = Synthetic DNA primer, F452
  modified_base 7: mod_base = OTHER; note = uracil
  modified_base 23: mod_base = OTHER; note = uracil
  source 1..29: mol_type = other DNA
ttcacttcagcaaatttttagatccagac

SEQ ID NO: 825 - DNA, 23 bp, synthetic construct
  misc_feature 1..23: note = Synthetic DNA primer, F453
  modified_base 9: mod_base = OTHER; note = uracil
  modified_base 20: mod_base = OTHER; note = uracil
  source 1..23: mol_type = other DNA
tgcccctttcgtctatttgtcag

SEQ ID NO: 826 - DNA, 28 bp, synthetic construct
  misc_feature 1..28: note = Synthetic DNA primer, F454
  modified_base 14: mod_base = OTHER; note = uracil
  modified_base 27: mod_base = OTHER; note = uracil
  source 1..28: mol_type = other DNA
ggagatttttctgtgttttctgctagtc

SEQ ID NO: 827 - DNA, 27 bp, synthetic construct
  misc_feature 1..27: note = Synthetic DNA primer, F455
  modified_base 6: mod_base = OTHER; note = uracil
  modified_base 16: mod_base = OTHER; note = uracil
  source 1..27: mol_type = other DNA
tgacatactttgcaatgaagcagaaaa

SEQ ID NO: 828 - DNA, 27 bp, synthetic construct
  misc_feature 1..27: note = Synthetic DNA primer, F456
  modified_base 12: mod_base = OTHER; note = uracil
  modified_base 26: mod_base = OTHER; note = uracil
  source 1..27: mol_type = other DNA
ggatcctgatatgtcttggtcaagttc

SEQ ID NO: 829 - RNA, 24 nt, synthetic construct
  misc_feature 1..24: note = Synthetic Primer, F457
  source 1..24: mol_type = other RNA
ggcaccaaatacgaaacacccata

SEQ ID NO: 830 - DNA, 28 bp, synthetic construct
  misc_feature 1..28: note = Synthetic DNA primer, F458
  modified_base 16: mod_base = OTHER; note = uracil
  modified_base 27: mod_base = OTHER; note = uracil
  source 1..28: mol_type = other DNA
atatctgtcagtgaatccactaggactg

SEQ ID NO: 831 - DNA, 28 bp, synthetic construct
  misc_feature 1..28: note = Synthetic DNA primer, F459
  modified_base 11: mod_base = OTHER; note = uracil
  modified_base 13: mod_base = OTHER; note = uracil
  source 1..28: mol_type = other DNA
tgaagaagcatctgaaactgtatttcct

SEQ ID NO: 832 - DNA, 31 bp, synthetic construct
  misc_feature 1..31: note = Synthetic DNA primer, F460
  modified_base 15: mod_base = OTHER; note = uracil
  modified_base 30: mod_base = OTHER; note = uracil
  source 1..31: mol_type = other DNA
ggactactactatatgtgcattgagagtttt

SEQ ID NO: 833 - DNA, 32 bp, synthetic construct
  misc_feature 1..32: note = Synthetic DNA primer, F461
  modified_base 16: mod_base = OTHER; note = uracil
  modified_base 31: mod_base = OTHER; note = uracil
  source 1..32: mol_type = other DNA
tggcttataaaatattaatgtgcttctgtttt

SEQ ID NO: 834 - DNA, 28 bp, synthetic construct
  misc_feature 1..28: note = Synthetic DNA primer, F462
  modified_base 9: mod_base = OTHER; note = uracil
  modified_base 20: mod_base = OTHER; note = uracil
  source 1..28: mol_type = other DNA
ggtaaaaatgcctattggatccaaagag

SEQ ID NO: 835 - DNA, 30 bp, synthetic construct
  misc_feature 1..30: note = Synthetic DNA primer, F463
  modified_base 14: mod_base = OTHER; note = uracil
  modified_base 21: mod_base = OTHER; note = uracil
  source 1..30: mol_type = other DNA
aatctacaaaaagtaagaactagcaagact

SEQ ID NO: 836 - DNA, 28 bp, synthetic construct
  misc_feature 1..28: note = Synthetic DNA primer, F464
  modified_base 14: mod_base = OTHER; note = uracil
  modified_base 27: mod_base = OTHER; note = uracil
  source 1..28: mol_type = other DNA
aagtgacaaaatctccaaggaagttgta

SEQ ID NO: 837 - DNA, 26 bp, synthetic construct
  misc_feature 1..26: note = Synthetic DNA primer, F465
  modified_base 9: mod_base = OTHER; note = uracil
  modified_base 22: mod_base = OTHER; note = uracil
  source 1..26: mol_type = other DNA
gaattctttgccacgtatttctagcc

SEQ ID NO: 838 - DNA, 27 bp, synthetic construct
  misc_feature 1..27: note = Synthetic DNA primer, F466
  modified_base 11: mod_base = OTHER; note = uracil
  modified_base 21: mod_base = OTHER; note = uracil
  source 1..27: mol_type = other DNA
ggcttcttcatttcagggtatcaaaaa

SEQ ID NO: 839 - DNA, 28 bp, synthetic construct
  misc_feature 1..28: note = Synthetic DNA primer, F467
  modified_base 7: mod_base = OTHER; note = uracil
  modified_base 17: mod_base = OTHER; note = uracil
  source 1..28: mol_type = other DNA
aatacatactgtttgctcacagaaggag

SEQ ID NO: 840 - DNA, 31 bp, synthetic construct
  misc_feature 1..31: note = Synthetic DNA primer, F468
  modified_base 17: mod_base = OTHER; note = uracil
  modified_base 28: mod_base = OTHER; note = uracil
  source 1..31: mol_type = other DNA
accgaaagaccaaaaatcagaactaattaac

SEQ ID NO: 841 - DNA, 27 bp, synthetic construct
  misc_feature 1..27: note = Synthetic DNA primer, F469
  modified_base 9: mod_base = OTHER; note = uracil
  modified_base 15: mod_base = OTHER; note = uracil
  source 1..27: mol_type = other DNA
tcacagaatgattctgaagaaccaact

SEQ ID NO: 842 - DNA, 25 bp, synthetic construct
  misc_feature 1..25: note = Synthetic DNA primer, F470
  modified_base 15: mod_base = OTHER; note = uracil
  modified_base 23: mod_base = OTHER; note = uracil
  source 1..25: mol_type = other DNA
attaccccagaagctgattctctgt

SEQ ID NO: 843 - DNA, 28 bp, synthetic construct
  misc_feature 1..28: note = Synthetic DNA primer, F471
  modified_base 17: mod_base = OTHER; note = uracil
  modified_base 26: mod_base = OTHER; note = uracil
  source 1..28: mol_type = other DNA
tatatgatcatgaaaatgccagcactct

SEQ ID NO: 844 - DNA, 28 bp, synthetic construct
  misc_feature 1..28: note = Synthetic DNA primer, F472
  modified_base 17: mod_base = OTHER; note = uracil
  modified_base 27: mod_base = OTHER; note = uracil
  source 1..28: mol_type = other DNA
ttcccatggaaaagaatcaagatgtatg

SEQ ID NO: 845 - DNA, 27 bp, synthetic construct
  misc_feature 1..27: note = Synthetic DNA primer, F473
  modified_base 16: mod_base = OTHER; note = uracil
  modified_base 26: mod_base = OTHER; note = uracil
  source 1..27: mol_type = other DNA
actgtcaatccagactctgaagaactt

SEQ ID NO: 846 - DNA, 25 bp, synthetic construct
  misc_feature 1..25: note = Synthetic DNA primer, F474
  modified_base 5: mod_base = OTHER; note = uracil
  modified_base 8: mod_base = OTHER; note = uracil
  source 1..25: mol_type = other DNA
caggtgataaacaagcaacccaagt

SEQ ID NO: 847 - DNA, 29 bp, synthetic construct
  misc_feature 1..29: note = Synthetic DNA primer, F475
  modified_base 11: mod_base = OTHER; note = uracil
  modified_base 25: mod_base = OTHER; note = uracil
  source 1..29: mol_type = other DNA
tggcattagataatcaaaagaaactgagc

SEQ ID NO: 848 - DNA, 30 bp, synthetic construct
  misc_feature 1..30: note = Synthetic DNA primer, F476
  modified_base 12: mod_base = OTHER; note = uracil
  modified_base 27: mod_base = OTHER; note = uracil
  source 1..30: mol_type = other DNA
gaatcaggaagtcagtttgaatttactcag

SEQ ID NO: 849 - DNA, 28 bp, synthetic construct
  misc_feature 1..28: note = Synthetic DNA primer, F477
  modified_base 7: mod_base = OTHER; note = uracil
  modified_base 20: mod_base = OTHER; note = uracil
  source 1..28: mol_type = other DNA
gcctgttgaaaaatgactgtaacaaaag

SEQ ID NO: 850 - DNA, 28 bp, synthetic construct
  misc_feature 1..28: note = Synthetic DNA primer, F478
  modified_base 14: mod_base = OTHER; note = uracil
  modified_base 22: mod_base = OTHER; note = uracil
  source 1..28: mol_type = other DNA
tgaagataacaaatatactgctgccagt

SEQ ID NO: 851 - DNA, 28 bp, synthetic construct
  misc_feature 1..28: note = Synthetic DNA primer, F479
  modified_base 14: mod_base = OTHER; note = uracil
  modified_base 20: mod_base = OTHER; note = uracil
  source 1..28: mol_type = other DNA
aggagggaaacactcagattaaagaaga

SEQ ID NO: 852 - DNA, 27 bp, synthetic construct
  misc_feature 1..27: note = Synthetic DNA primer, F480
  modified_base 15: mod_base = OTHER; note = uracil
  modified_base 26: mod_base = OTHER; note = uracil
  source 1..27: mol_type = other DNA
tttcagactgcaagtgggaaaaatatt

SEQ ID NO: 853 - DNA, 30 bp, synthetic construct
  misc_feature 1..30: note = Synthetic DNA primer, F481
  modified_base 13: mod_base = OTHER; note = uracil
  modified_base 29: mod_base = OTHER; note = uracil
  source 1..30: mol_type = other DNA
tcttcttacaactccctatacattctcatt

SEQ ID NO: 854 - DNA, 27 bp, synthetic construct
  misc_feature 1..27: note = Synthetic DNA primer, F482
  modified_base 12: mod_base = OTHER; note = uracil
  modified_base 26: mod_base = OTHER; note = uracil
  source 1..27: mol_type = other DNA
ccagttggtactggaaatcaactagtg

SEQ ID NO: 855 - DNA, 28 bp, synthetic construct
  misc_feature 1..28: note = Synthetic DNA primer, F483
  modified_base 13: mod_base = OTHER; note = uracil
  modified_base 24: mod_base = OTHER; note = uracil
  source 1..28: mol_type = other DNA
aaaagagcaaggtactagtgaaatcacc

SEQ ID NO: 856 - DNA, 28 bp, synthetic construct
  misc_feature 1..28: note = Synthetic DNA primer, F484
  modified_base 13: mod_base = OTHER; note = uracil
  modified_base 26: mod_base = OTHER; note = uracil
  source 1..28: mol_type = other DNA
aaaaaccttgtttctattgagactgtgg

SEQ ID NO: 857 - DNA, 28 bp, synthetic construct
  misc_feature 1..28: note = Synthetic DNA primer, F485
  modified_base 11: mod_base = OTHER; note = uracil
  modified_base 27: mod_base = OTHER; note = uracil
  source 1..28: mol_type = other DNA
aattcagccttagctttttacacaagtt

SEQ ID NO: 858 - DNA, 28 bp, synthetic construct
  misc_feature 1..28: note = Synthetic DNA primer, F486
  modified_base 10: mod_base = OTHER; note = uracil
  modified_base 17: mod_base = OTHER; note = uracil
  source 1..28: mol_type = other DNA
tgacaaaaatcatctctccgaaaaacaa

SEQ ID NO: 859 - DNA, 25 bp, synthetic construct
  misc_feature 1..25: note = Synthetic DNA primer, F487
  modified_base 14: mod_base = OTHER; note = uracil
  modified_base 24: mod_base = OTHER; note = uracil
  source 1..25: mol_type = other DNA
aataattttgaggtagggccacctg

SEQ ID NO: 860 - DNA, 32 bp, synthetic construct
  misc_feature 1..32: note = Synthetic DNA primer, F488
  modified_base 12: mod_base = OTHER; note = uracil
  modified_base 28: mod_base = OTHER; note = uracil
  source 1..32: mol_type = other DNA
tcataactctctagataatgatgaatgtagca

SEQ ID NO: 861 - DNA, 28 bp, synthetic construct
  misc_feature 1..28: note = Synthetic DNA primer, F489
  modified_base 13: mod_base = OTHER; note = uracil
  modified_base 27: mod_base = OTHER; note = uracil
  source 1..28: mol_type = other DNA
gtatagggaagcttcataagtcagtctc

SEQ ID NO: 862 - DNA, 28 bp, synthetic construct
  misc_feature 1..28: note = Synthetic DNA primer, F490
  modified_base 10: mod_base = OTHER; note = uracil
  modified_base 26: mod_base = OTHER; note = uracil
  source 1..28: mol_type = other DNA
agaagatagtaccaagcaagtcttttcc

SEQ ID NO: 863 - DNA, 25 bp, synthetic construct
  misc_feature 1..25: note = Synthetic DNA primer, F491
  modified_base 13: mod_base = OTHER; note = uracil
  modified_base 24: mod_base = OTHER; note = uracil
  source 1..25: mol_type = other DNA
tagtacagcaagtggaaagcaagtt

SEQ ID NO: 864 - DNA, 27 bp, synthetic construct
  misc_feature 1..27: note = Synthetic DNA primer, F492
  modified_base 12: mod_base = OTHER; note = uracil
  modified_base 26: mod_base = OTHER; note = uracil
  source 1..27: mol_type = other DNA
caggcttcacctaaaaacgtaaaaatg

SEQ ID NO: 865 - DNA, 32 bp, synthetic construct
  misc_feature 1..32: note = Synthetic DNA primer, F493
  modified_base 9: mod_base = OTHER; note = uracil
  modified_base 17: mod_base = OTHER; note = uracil
  source 1..32: mol_type = other DNA
atgaaatatttctttttaggagaaccctcaat

SEQ ID NO: 866 - DNA, 27 bp, synthetic construct
  misc_feature 1..27: note = Synthetic DNA primer, F494
  modified_base 8: mod_base = OTHER; note = uracil
  modified_base 18: mod_base = OTHER; note = uracil
  source 1..27: mol_type = other DNA
atatattttctccccattgcagcacaa

SEQ ID NO: 867 - DNA, 28 bp, synthetic construct
  misc_feature 1..28: note = Synthetic DNA primer, F495
  modified_base 11: mod_base = OTHER; note = uracil
  modified_base 25: mod_base = OTHER; note = uracil
  source 1..28: mol_type = other DNA
aggacatccattttatcaagtttctgct

SEQ ID NO: 868 - DNA, 33 bp, synthetic construct
  misc_feature 1..33: note = Synthetic DNA primer, F496
  modified_base 13: mod_base = OTHER; note = uracil
  modified_base 31: mod_base = OTHER; note = uracil
  source 1..33: mol_type = other DNA
tggctctgatgatagtaaaaataagattaatga

SEQ ID NO: 869 - DNA, 28 bp, synthetic construct
  misc_feature 1..28: note = Synthetic DNA primer, F497
  modified_base 11: mod_base = OTHER; note = uracil
  modified_base 22: mod_base = OTHER; note = uracil
  source 1..28: mol_type = other DNA
gctgtatacgtatggcgtttctaaacat

SEQ ID NO: 870 - DNA, 25 bp, synthetic construct
  misc_feature 1..25: note = Synthetic DNA primer, R366
  modified_base 10: mod_base = OTHER; note = uracil
  modified_base 24: mod_base = OTHER; note = uracil
  source 1..25: mol_type = other DNA
tcccgtggctggtaaatctgaaata

SEQ ID NO: 871 - DNA, 27 bp, synthetic construct
  misc_feature 1..27: note = Synthetic DNA primer, R367
  modified_base 13: mod_base = OTHER; note = uracil
  modified_base 26: mod_base = OTHER; note = uracil
  source 1..27: mol_type = other DNA
ccaaaacatgaatgttctcaacaagtg

SEQ ID NO: 872 - DNA, 25 bp, synthetic construct
  misc_feature 1..25: note = Synthetic DNA primer, R368
  modified_base 11: mod_base = OTHER; note = uracil
  modified_base 23: mod_base = OTHER; note = uracil
  source 1..25: mol_type = other DNA
attcctgcactaatgtgttcattct

SEQ ID NO: 873 - RNA, 23 nt, synthetic construct
  misc_feature 1..23: note = Synthetic Primer, R369
  source 1..23: mol_type = other RNA
gtccaaagcgagcaagagaatcc

SEQ ID NO: 874 - DNA, 26 bp, synthetic construct
  misc_feature 1..26: note = Synthetic DNA primer, R370
  modified_base 9: mod_base = OTHER; note = uracil
  modified_base 20: mod_base = OTHER; note = uracil
  source 1..26: mol_type = other DNA
agttccagtagtcctactttgacact

SEQ ID NO: 875 - DNA, 23 bp, synthetic construct
  misc_feature 1..23: note = Synthetic DNA primer, R371
  modified_base 10: mod_base = OTHER; note = uracil
  modified_base 22: mod_base = OTHER; note = uracil
  source 1..23: mol_type = other DNA
agagcacgttcttctgctgtatg

SEQ ID NO: 876 - DNA, 33 bp, synthetic construct
  misc_feature 1..33: note = Synthetic DNA primer, R372
  modified_base 16: mod_base = OTHER; note = uracil
  modified_base 32: mod_base = OTHER; note = uracil
  source 1..33: mol_type = other DNA
agttgaatatctgtttttcaacaagtacatttt

SEQ ID NO: 877 - DNA, 21 bp, synthetic construct
  misc_feature 1..21: note = Synthetic DNA primer, R373
  modified_base 9: mod_base = OTHER; note = uracil
  modified_base 18: mod_base = OTHER; note = uracil
  source 1..21: mol_type = other DNA
gcctggcctgaatgccttaaa

SEQ ID NO: 878 - DNA, 30 bp, synthetic construct
  misc_feature 1..30: note = Synthetic DNA primer, R374
  modified_base 17: mod_base = OTHER; note = uracil
  modified_base 25: mod_base = OTHER; note = uracil
  source 1..30: mol_type = other DNA
caatttcaacacaagctaaactagtaggat

SEQ ID NO: 879 - DNA, 26 bp, synthetic construct
  misc_feature 1..26: note = Synthetic DNA primer, R375
  modified_base 11: mod_base = OTHER; note = uracil
  modified_base 20: mod_base = OTHER; note = uracil
  source 1..26: mol_type = other DNA
tcaacaaaagtgccagtagtcatttc

SEQ ID NO: 880 - DNA, 24 bp, synthetic construct
  misc_feature 1..24: note = Synthetic DNA primer, R376
  modified_base 8: mod_base = OTHER; note = uracil
  modified_base 19: mod_base = OTHER; note = uracil
  source 1..24: mol_type = other DNA
ctgtttttagcaaaagcgtccaga

SEQ ID NO: 881 - DNA, 22 bp, synthetic construct
  misc_feature 1..22: note = Synthetic DNA primer, R377
  modified_base 10: mod_base = OTHER; note = uracil
  modified_base 18: mod_base = OTHER; note = uracil
  source 1..22: mol_type = other DNA
agtcagcccttgctctttgaat

SEQ ID NO: 882 - DNA, 27 bp, synthetic construct
  misc_feature 1..27: note = Synthetic DNA primer, R378
  modified_base 8: mod_base = OTHER; note = uracil
  modified_base 18: mod_base = OTHER; note = uracil
  source 1..27: mol_type = other DNA
ttggccatacaaagtgataaaggactt

SEQ ID NO: 883 - DNA, 22 bp, synthetic construct
  misc_feature 1..22: note = Synthetic DNA primer, R379
  modified_base 10: mod_base = OTHER; note = uracil
  modified_base 21: mod_base = OTHER; note = uracil
  source 1..22: mol_type = other DNA
tttgcagggtgaagagctagtc

SEQ ID NO: 884 - DNA, 25 bp, synthetic construct
  misc_feature 1..25: note = Synthetic DNA primer, R380
  modified_base 9: mod_base = OTHER; note = uracil
  modified_base 22: mod_base = OTHER; note = uracil
  source 1..25: mol_type = other DNA
tgtacaaatgggactaacaggtgga

SEQ ID NO: 885 - DNA, 30 bp, synthetic construct
  misc_feature 1..30: note = Synthetic DNA primer, R381
  modified_base 14: mod_base = OTHER; note = uracil
  modified_base 29: mod_base = OTHER; note = uracil
  source 1..30: mol_type = other DNA
agcataccaagtctactgaataaacacttt

SEQ ID NO: 886 - DNA, 25 bp, synthetic construct
  misc_feature 1..25: note = Synthetic DNA primer, R382
  modified_base 12: mod_base = OTHER; note = uracil
  modified_base 24: mod_base = OTHER; note = uracil
  source 1..25: mol_type = other DNA
cctggagtcgattgattagagccta

SEQ ID NO: 887 - DNA, 28 bp, synthetic construct
  misc_feature 1..28: note = Synthetic DNA primer, R383
  modified_base 12: mod_base = OTHER; note = uracil
  modified_base 24: mod_base = OTHER; note = uracil
  source 1..28: mol_type = other DNA
aatgtgttatgtggctccattattagct

SEQ ID NO: 888 - DNA, 29 bp, synthetic construct
  misc_feature 1..29: note = Synthetic DNA primer, R384
  modified_base 12: mod_base = OTHER; note = uracil
  modified_base 28: mod_base = OTHER; note = uracil
  source 1..29: mol_type = other DNA
gcatttttacctacgatattcctccaatg

SEQ ID NO: 889 - DNA, 28 bp, synthetic construct
  misc_feature 1..28: note = Synthetic DNA primer, R385
  modified_base 12: mod_base = OTHER; note = uracil
  modified_base 26: mod_base = OTHER; note = uracil
  source 1..28: mol_type = other DNA
accagtaaaaataaagaaccaggagtgg

SEQ ID NO: 890 - DNA, 28 bp, synthetic construct
  misc_feature 1..28: note = Synthetic DNA primer, R386
  modified_base 13: mod_base = OTHER; note = uracil
  modified_base 24: mod_base = OTHER; note = uracil
  source 1..28: mol_type = other DNA
ttatagaggttttctactgttgctgcat

SEQ ID NO: 891 - DNA, 27 bp, synthetic construct
  misc_feature 1..27: note = Synthetic DNA primer, R387
  modified_base 13: mod_base = OTHER; note = uracil
  modified_base 24: mod_base = OTHER; note = uracil
  source 1..27: mol_type = other DNA
gcagttgtgagattatcttttcatggc

SEQ ID NO: 892 - DNA, 24 bp, synthetic construct
  misc_feature 1..24: note = Synthetic DNA primer, R388
  modified_base 13: mod_base = OTHER; note = uracil
  modified_base 22: mod_base = OTHER; note = uracil
  source 1..24: mol_type = other DNA
catcattcacccttggcacagtaa

SEQ ID NO: 893 - DNA, 27 bp, synthetic construct
  misc_feature 1..27: note = Synthetic DNA primer, R389
  modified_base 4: mod_base = OTHER; note = uracil
  modified_base 18: mod_base = OTHER; note = uracil
  source 1..27: mol_type = other DNA
aaatattttctaggaattgcgggagga

SEQ ID NO: 894 - DNA, 26 bp, synthetic construct
  misc_feature 1..26: note = Synthetic DNA primer, R390
  modified_base 5: mod_base = OTHER; note = uracil
  modified_base 8: mod_base = OTHER; note = uracil
  source 1..26: mol_type = other DNA
caggtaatcggctctaaagaaacatg

SEQ ID NO: 895 - DNA, 22 bp, synthetic construct
  misc_feature 1..22: note = Synthetic DNA primer, R391
  modified_base 10: mod_base = OTHER; note = uracil
  modified_base 21: mod_base = OTHER; note = uracil
  source 1..22: mol_type = other DNA
cagagagattcgaggcagagtg

SEQ ID NO: 896 - DNA, 31 bp, synthetic construct
  misc_feature 1..31: note = Synthetic DNA primer, R392
  modified_base 6: mod_base = OTHER; note = uracil
  modified_base 13: mod_base = OTHER; note = uracil
  source 1..31: mol_type = other DNA
agtagtggattttgcttctctgatataaact

SEQ ID NO: 897 - DNA, 32 bp, synthetic construct
  misc_feature 1..32: note = Synthetic DNA primer, R393
  modified_base 6: mod_base = OTHER; note = uracil
  modified_base 18: mod_base = OTHER; note = uracil
  source 1..32: mol_type = other DNA
gctcttagccaaaatattagcataaaaatcag

SEQ ID NO: 898 - DNA, 31 bp, synthetic construct
  misc_feature 1..31: note = Synthetic DNA primer, R394
  modified_base 10: mod_base = OTHER; note = uracil
  modified_base 22: mod_base = OTHER; note = uracil
  source 1..31: mol_type = other DNA
aaaaagcattgtttttaatcatacctgactt

SEQ ID NO: 899 - DNA, 27 bp, synthetic construct
  misc_feature 1..27: note = Synthetic DNA primer, R395
  modified_base 9: mod_base = OTHER; note = uracil
  modified_base 19: mod_base = OTHER; note = uracil
  source 1..27: mol_type = other DNA
ggtacagatttgtaaatctcagggcaa

SEQ ID NO: 900 - RNA, 20 nt, synthetic construct
  misc_feature 1..20: note = Synthetic Primer, R396
  source 1..20: mol_type = other RNA
gagatcacgggtgacagagc

SEQ ID NO: 901 - DNA, 23 bp, synthetic construct
  misc_feature 1..23: note = Synthetic DNA primer, R397
  modified_base 11: mod_base = OTHER; note = uracil
  modified_base 20: mod_base = OTHER; note = uracil
  source 1..23: mol_type = other DNA
acctacctgataccccagatccc

SEQ ID NO: 902 - DNA, 27 bp, synthetic construct
  misc_feature 1..27: note = Synthetic DNA primer, R398
  modified_base 11: mod_base = OTHER; note = uracil
  modified_base 22: mod_base = OTHER; note = uracil
  source 1..27: mol_type = other DNA
tccagattgatcttgggagtgtaaaaa

SEQ ID NO: 903 - DNA, 28 bp, synthetic construct
  misc_feature 1..28: note = Synthetic DNA primer, R399
  modified_base 13: mod_base = OTHER; note = uracil
  modified_base 26: mod_base = OTHER; note = uracil
  source 1..28: mol_type = other DNA
gtgtgctagaggtaactcatgataatgg

SEQ ID NO: 904 - DNA, 26 bp, synthetic construct
  misc_feature 1..26: note = Synthetic DNA primer, R400
  modified_base 8: mod_base = OTHER; note = uracil
  modified_base 22: mod_base = OTHER; note = uracil
  source 1..26: mol_type = other DNA
gaaagggtcaacaaaagaatgtccat

SEQ ID NO: 905 - DNA, 26 bp, synthetic construct
  misc_feature 1..26: note = Synthetic DNA primer, R401
  modified_base 14: mod_base = OTHER; note = uracil
  modified_base 22: mod_base = OTHER; note = uracil
  source 1..26: mol_type = other DNA
gaaagttccccaattgaaagttgcag

SEQ ID NO: 906 - DNA, 30 bp, synthetic construct
  misc_feature 1..30: note = Synthetic DNA primer, R402
  modified_base 12: mod_base = OTHER; note = uracil
  modified_base 28: mod_base = OTHER; note = uracil
  source 1..30: mol_type = other DNA
aactttgtaattcaacattcatcgttgtgt

SEQ ID NO: 907 - DNA, 27 bp, synthetic construct
  misc_feature 1..27: note = Synthetic DNA primer, R403
  modified_base 12: mod_base = OTHER; note = uracil
  modified_base 26: mod_base = OTHER; note = uracil
  source 1..27: mol_type = other DNA
tagatgataggtggtacatgcacagtt

SEQ ID NO: 908 - DNA, 29 bp, synthetic construct
  misc_feature 1..29: note = Synthetic DNA primer, R404
  modified_base 4: mod_base = OTHER; note = uracil
  modified_base 17: mod_base = OTHER; note = uracil
  source 1..29: mol_type = other DNA
acctgaattatcactatcagaacaaagca

SEQ ID NO: 909 - DNA, 21 bp, synthetic construct
  misc_feature 1..21: note = Synthetic DNA primer, R405
  modified_base 7: mod_base = OTHER; note = uracil
  modified_base 19: mod_base = OTHER; note = uracil
  source 1..21: mol_type = other DNA
gaacagtacccgttcccttga

SEQ ID NO: 910 - DNA, 22 bp, synthetic construct
  misc_feature 1..22: note = Synthetic DNA primer, R406
  modified_base 11: mod_base = OTHER; note = uracil
  modified_base 18: mod_base = OTHER; note = uracil
  source 1..22: mol_type = other DNA
cttgaggacctgcgaaatccag

SEQ ID NO: 911 - DNA, 30 bp, synthetic construct
  misc_feature 1..30: note = Synthetic DNA primer, R407
  modified_base 12: mod_base = OTHER; note = uracil
  modified_base 28: mod_base = OTHER; note = uracil
  source 1..30: mol_type = other DNA
tggaaagcttctcaaagtatttcattttct

SEQ ID NO: 912 - DNA, 27 bp, synthetic construct
  misc_feature 1..27: note = Synthetic DNA primer, R408
  modified_base 11: mod_base = OTHER; note = uracil
  modified_base 26: mod_base = OTHER; note = uracil
  source 1..27: mol_type = other DNA
gcagcgtttatagtctgcttttacatc

SEQ ID NO: 913 - DNA, 26 bp, synthetic construct
  misc_feature 1..26: note = Synthetic DNA primer, R409
  modified_base 9: mod_base = OTHER; note = uracil
  modified_base 22: mod_base = OTHER; note = uracil
  source 1..26: mol_type = other DNA
aacgggcttggaagaaaataatcaag

SEQ ID NO: 914 - DNA, 25 bp, synthetic construct
  misc_feature 1..25: note = Synthetic DNA primer, R410
  modified_base 10: mod_base = OTHER; note = uracil
  modified_base 19: mod_base = OTHER; note = uracil
  source 1..25: mol_type = other DNA
tctgctagcttgttttcttcacagt

SEQ ID NO: 915 - DNA, 30 bp, synthetic construct
  misc_feature 1..30: note = Synthetic DNA primer, R411
  modified_base 13: mod_base = OTHER; note = uracil
  modified_base 24: mod_base = OTHER; note = uracil
  source 1..30: mol_type = other DNA
aacaatataccttctcagtctactaggcat

SEQ ID NO: 916 - DNA, 28 bp, synthetic construct
  misc_feature 1..28: note = Synthetic DNA primer, R412
  modified_base 10: mod_base = OTHER; note = uracil
  modified_base 22: mod_base = OTHER; note = uracil
  source 1..28: mol_type = other DNA
cagataacttagaacagcctatgggaag

SEQ ID NO: 917 - DNA, 27 bp, synthetic construct
  misc_feature 1..27: note = Synthetic DNA primer, R413
  modified_base 10: mod_base = OTHER; note = uracil
  modified_base 23: mod_base = OTHER; note = uracil
  source 1..27: mol_type = other DNA
ggccaaaattgaatgctatgcttagat

SEQ ID NO: 918 - DNA, 30 bp, synthetic construct
  misc_feature 1..30: note = Synthetic DNA primer, R414
  modified_base 9: mod_base = OTHER; note = uracil
  modified_base 24: mod_base = OTHER; note = uracil
  source 1..30: mol_type = other DNA
agcacaattagccgtaataacattagagaa

SEQ ID NO: 919 - DNA, 28 bp, synthetic construct
  misc_feature 1..28: note = Synthetic DNA primer, R415
  modified_base 13: mod_base = OTHER; note = uracil
  modified_base 25: mod_base = OTHER; note = uracil
  source 1..28: mol_type = other DNA
tggactcattactccaaataaacatgga

SEQ ID NO: 920 - DNA, 28 bp, synthetic construct
  misc_feature 1..28: note = Synthetic DNA primer, R416
  modified_base 16: mod_base = OTHER; note = uracil
  modified_base 27: mod_base = OTHER; note = uracil
  source 1..28: mol_type = other DNA
gtctaatatcaagcctgtacagacagtt

SEQ ID NO: 921 - DNA, 27 bp, synthetic construct
  misc_feature 1..27: note = Synthetic DNA primer, R417
  modified_base 12: mod_base = OTHER; note = uracil
  modified_base 21: mod_base = OTHER; note = uracil
  source 1..27: mol_type = other DNA
tgcagaatacattcaaggtttcaaagc

SEQ ID NO: 922 - DNA, 25 bp, synthetic construct
  misc_feature 1..25: note = Synthetic DNA primer, R418
  modified_base 11: mod_base = OTHER; note = uracil
  modified_base 21: mod_base = OTHER; note = uracil
  source 1..25: mol_type = other DNA
aataaatgtgtgagtcagtgtgcag

SEQ ID NO: 923 - DNA, 22 bp, synthetic construct
  misc_feature 1..22: note = Synthetic DNA primer, R419
  modified_base 10: mod_base = OTHER; note = uracil
  modified_base 21: mod_base = OTHER; note = uracil
  source 1..22: mol_type = other DNA
aagccttcatccggagagtgta

SEQ ID NO: 924 - DNA, 25 bp, synthetic construct
  misc_feature 1..25: note = Synthetic DNA primer, R420
  modified_base 7: mod_base = OTHER; note = uracil
  modified_base 24: mod_base = OTHER; note = uracil
  source 1..25: mol_type = other DNA
taatgctgaagaccccaaagatctc

SEQ ID NO: 925 - RNA, 27 nt, synthetic construct
  misc_feature 1..27: note = Synthetic Primer, R421
  source 1..27: mol_type = other RNA
gccaaatgaacagacaagtaaaagaca

SEQ ID NO: 926 - DNA, 28 bp, synthetic construct
  misc_feature 1..28: note = Synthetic DNA primer, R422
  modified_base 13: mod_base = OTHER; note = uracil
  modified_base 25: mod_base = OTHER; note = uracil
  source 1..28: mol_type = other DNA
gcaaattgatagttgttctagcagtgaa

SEQ ID NO: 927 - DNA, 28 bp, synthetic construct
  misc_feature 1..28: note = Synthetic DNA primer, R423
  modified_base 9: mod_base = OTHER; note = uracil
  modified_base 24: mod_base = OTHER; note = uracil
  source 1..28: mol_type = other DNA
cagcagtataagcaatatggaactcgaa

SEQ ID NO: 928 - DNA, 26 bp, synthetic construct
  misc_feature 1..26: note = Synthetic DNA primer, R424
  modified_base 13: mod_base = OTHER; note = uracil
  modified_base 25: mod_base = OTHER; note = uracil
  source 1..26: mol_type = other DNA
ggagcagaatggtcaagtgatgaata

SEQ ID NO: 929 - DNA, 32 bp, synthetic construct
  misc_feature 1..32: note = Synthetic DNA primer, R425
  modified_base 17: mod_base = OTHER; note = uracil
  modified_base 30: mod_base = OTHER; note = uracil
  source 1..32: mol_type = other DNA
ttttataactagattttccttctctccattcc

SEQ ID NO: 930 - DNA, 24 bp, synthetic construct
  misc_feature 1..24: note = Synthetic DNA primer, R426
  modified_base 12: mod_base = OTHER; note = uracil
  modified_base 23: mod_base = OTHER; note = uracil
  source 1..24: mol_type = other DNA
agagcgtcccctcacaaataaatt

SEQ ID NO: 931 - DNA, 28 bp, synthetic construct
  misc_feature 1..28: note = Synthetic DNA primer, R427
  modified_base 13: mod_base = OTHER; note = uracil
  modified_base 23: mod_base = OTHER; note = uracil
  source 1..28: mol_type = other DNA
gaaagagttcactccaaatcagtagaga

SEQ ID NO: 932 - DNA, 24 bp, synthetic construct
  misc_feature 1..24: note = Synthetic DNA primer, R428
  modified_base 9: mod_base = OTHER; note = uracil
  modified_base 21: mod_base = OTHER; note = uracil
  source 1..24: mol_type = other DNA
ggttctgatgactcacatgatggg

SEQ ID NO: 933 - DNA, 28 bp, synthetic construct
  misc_feature 1..28: note = Synthetic DNA primer, R429
  modified_base 8: mod_base = OTHER; note = uracil
  modified_base 26: mod_base = OTHER; note = uracil
  source 1..28: mol_type = other DNA
ccctgtgtgagagaaaagaatggaataa

SEQ ID NO: 934 - DNA, 28 bp, synthetic construct
  misc_feature 1..28: note = Synthetic DNA primer, R430
  modified_base 5: mod_base = OTHER; note = uracil
  modified_base 17: mod_base = OTHER; note = uracil
  source 1..28: mol_type = other DNA
aggctgaattctgtaataaaagcaaaca

SEQ ID NO: 935 - DNA, 26 bp, synthetic construct
  misc_feature 1..26: note = Synthetic DNA primer, R431
  modified_base 11: mod_base = OTHER; note = uracil
  modified_base 22: mod_base = OTHER; note = uracil
  source 1..26: mol_type = other DNA
agggtagttctgtttcaaacttgcat

SEQ ID NO: 936 - DNA, 30 bp, synthetic construct
  misc_feature 1..30: note = Synthetic DNA primer, R432
  modified_base 15: mod_base = OTHER; note = uracil
  modified_base 28: mod_base = OTHER; note = uracil
  source 1..30: mol_type = other DNA
tgtatattttcagctgcttgtgaattttct

SEQ ID NO: 937 - DNA, 28 bp, synthetic construct
  misc_feature 1..28: note = Synthetic DNA primer, R433
  modified_base 13: mod_base = OTHER; note = uracil
  modified_base 26: mod_base = OTHER; note = uracil
  source 1..28: mol_type = other DNA
gacagttctgcatacatgtaactagtgt

SEQ ID NO: 938 - RNA, 22 nt, synthetic construct
  misc_feature 1..22: note = Synthetic Primer, R434
  source 1..22: mol_type = other RNA
gcggatacaacctcaaaagacg

SEQ ID NO: 939 - DNA, 27 bp, synthetic construct
  misc_feature 1..27: note = Synthetic DNA primer, R435
  modified_base 3: mod_base = OTHER; note = uracil
  modified_base 15: mod_base = OTHER; note = uracil
  source 1..27: mol_type = other DNA
tgtcaagtttctcttcaggaggaaaag

SEQ ID NO: 940 - DNA, 32 bp, synthetic construct
  misc_feature 1..32: note = Synthetic DNA primer, R436
  modified_base 13: mod_base = OTHER; note = uracil
  modified_base 26: mod_base = OTHER; note = uracil
  source 1..32: mol_type = other DNA
aaggaaaataactctcctgaacatctaaaaga

SEQ ID NO: 941 - DNA, 30 bp, synthetic construct
  misc_feature 1..30: note = Synthetic DNA primer, R437
  modified_base 12: mod_base = OTHER; note = uracil
  modified_base 28: mod_base = OTHER; note = uracil
  source 1..30: mol_type = other DNA
tgttgaagagctattgaaaatcatttgtgc

SEQ ID NO: 942 - DNA, 30 bp, synthetic construct
  misc_feature 1..30: note = Synthetic DNA primer, R438
  modified_base 12: mod_base = OTHER; note = uracil
  modified_base 26: mod_base = OTHER; note = uracil
  source 1..30: mol_type = other DNA
acagctcaaagttgaacttattcactaaga

SEQ ID NO: 943 - DNA, 31 bp, synthetic construct
  misc_feature 1..31: note = Synthetic DNA primer, R439
  modified_base 15: mod_base = OTHER; note = uracil
  modified_base 28: mod_base = OTHER; note = uracil
  source 1..31: mol_type = other DNA
atgtttttctaatgtgttaaagttcattgga

SEQ ID NO: 944 - DNA, 28 bp, synthetic construct
  misc_feature 1..28: note = Synthetic DNA primer, R440
  modified_base 12: mod_base = OTHER; note = uracil
  modified_base 25: mod_base = OTHER; note = uracil
  source 1..28: mol_type = other DNA
gccagtttccatatgatccatctatagt

SEQ ID NO: 945 - DNA, 28 bp, synthetic construct
  misc_feature 1..28: note = Synthetic DNA primer, R441
  modified_base 15: mod_base = OTHER; note = uracil
  modified_base 27: mod_base = OTHER; note = uracil
  source 1..28: mol_type = other DNA
agaaaccttaaccatactgccgtatatg

SEQ ID NO: 946 - DNA, 24 bp, synthetic construct
  misc_feature 1..24: note = Synthetic DNA primer, R442
  modified_base 10: mod_base = OTHER; note = uracil
  modified_base 23: mod_base = OTHER; note = uracil
  source 1..24: mol_type = other DNA
gccactttttgggtatctgcacta

SEQ ID NO: 947 - DNA, 23 bp, synthetic construct
  misc_feature 1..23: note = Synthetic DNA primer, R443
  modified_base 10: mod_base = OTHER; note = uracil
  modified_base 20: mod_base = OTHER; note = uracil
  source 1..23: mol_type = other DNA
ttcaagaggtgtacaggcatcag

SEQ ID NO: 948 - DNA, 28 bp, synthetic construct
  misc_feature 1..28: note = Synthetic DNA primer, R444
  modified_base 14: mod_base = OTHER; note = uracil
  modified_base 27: mod_base = OTHER; note = uracil
  source 1..28: mol_type = other DNA
ggtcaggaaagaatccaagtttggtata

SEQ ID NO: 949 - DNA, 28 bp, synthetic construct
  misc_feature 1..28: note = Synthetic DNA primer, R445
  modified_base 11: mod_base = OTHER; note = uracil
  modified_base 27: mod_base = OTHER; note = uracil
  source 1..28: mol_type = other DNA
cctcagctcctagactttcagaaatatg

SEQ ID NO: 950 - DNA, 32 bp, synthetic construct
  misc_feature 1..32: note = Synthetic DNA primer, R446
  modified_base 11: mod_base = OTHER; note = uracil
  modified_base 29: mod_base = OTHER; note = uracil
  source 1..32: mol_type = other DNA
aaactccatctcaaacaaacaaacaaattaat

SEQ ID NO: 951 - DNA, 29 bp, synthetic construct
  misc_feature 1..29: note = Synthetic DNA primer, R447
  modified_base 13: mod_base = OTHER; note = uracil
  modified_base 27: mod_base = OTHER; note = uracil
  source 1..29: mol_type = other DNA
cctcctgaattttagtgaataaggcttct

SEQ ID NO: 952 - DNA, 20 bp, synthetic construct
  misc_feature 1..20: note = Synthetic DNA primer, R448
  modified_base 14: mod_base = OTHER; note = uracil
  modified_base 18: mod_base = OTHER; note = uracil
  source 1..20: mol_type = other DNA
gcaaagcacgaacttgctgt

SEQ ID NO: 953 - DNA, 25 bp, synthetic construct
  misc_feature 1..25: note = Synthetic DNA primer, R449
  modified_base 5: mod_base = OTHER; note = uracil
  modified_base 18: mod_base = OTHER; note = uracil
  source 1..25: mol_type = other DNA
gtgatggccagagagtctaaaacag

SEQ ID NO: 954 - DNA, 26 bp, synthetic construct
  misc_feature 1..26: note = Synthetic DNA primer, R450
  modified_base 11: mod_base = OTHER; note = uracil
  modified_base 24: mod_base = OTHER; note = uracil
  source 1..26: mol_type = other DNA
tgacatcccttgataaaccttgttcc

SEQ ID NO: 955 - DNA, 26 bp, synthetic construct
  misc_feature 1..26: note = Synthetic DNA primer, R451
  modified_base 11: mod_base = OTHER; note = uracil
  modified_base 25: mod_base = OTHER; note = uracil
  source 1..26: mol_type = other DNA
tttttgtcgctgctaactgtatgtta

SEQ ID NO: 956 - DNA, 32 bp, synthetic construct
  misc_feature 1..32: note = Synthetic DNA primer, R452
  modified_base 12: mod_base = OTHER; note = uracil
  modified_base 25: mod_base = OTHER; note = uracil
  source 1..32: mol_type = other DNA
gctccaactaatcataagagattttaaaagac

SEQ ID NO: 957 - DNA, 26 bp, synthetic construct
  misc_feature 1..26: note = Synthetic DNA primer, R453
  modified_base 14: mod_base = OTHER; note = uracil
  modified_base 24: mod_base = OTHER; note = uracil
  source 1..26: mol_type = other DNA
aagtaagaaggcctgatttggattct

SEQ ID NO: 958 - DNA, 28 bp, synthetic construct
  misc_feature 1..28: note = Synthetic DNA primer, R454
  modified_base 11: mod_base = OTHER; note = uracil
  modified_base 24: mod_base = OTHER; note = uracil
  source 1..28: mol_type = other DNA
gctatttccttgatactggactgtcaaa

SEQ ID NO: 959 - DNA, 31 bp, synthetic construct
  misc_feature 1..31: note = Synthetic DNA primer, R455
  modified_base 11: mod_base = OTHER; note = uracil
  modified_base 23: mod_base = OTHER; note = uracil
  source 1..31: mol_type = other DNA
attccttgagtttacattaacttaccagaag

SEQ ID NO: 960 - DNA, 28 bp, synthetic construct
  misc_feature 1..28: note = Synthetic DNA primer, R456
  modified_base 17: mod_base = OTHER; note = uracil
  modified_base 27: mod_base = OTHER; note = uracil
  source 1..28: mol_type = other DNA
atgacaattatcaacctcatctgctctt

SEQ ID NO: 961 - DNA, 30 bp, synthetic construct
  misc_feature 1..30: note = Synthetic DNA primer, R457
  modified_base 8: mod_base = OTHER; note = uracil
  modified_base 20: mod_base = OTHER; note = uracil
  source 1..30: mol_type = other DNA
taaattgtttttctcctgttgaaccagaca

SEQ ID NO: 962 - DNA, 27 bp, synthetic construct
  misc_feature 1..27: note = Synthetic DNA primer, R458
  modified_base 12: mod_base = OTHER; note = uracil
  modified_base 24: mod_base = OTHER; note = uracil
  source 1..27: mol_type = other DNA
cctgcttatttttctcacattcttccg

SEQ ID NO: 963 - DNA, 29 bp, synthetic construct
  misc_feature 1..29: note = Synthetic DNA primer, R459
  modified_base 5: mod_base = OTHER; note = uracil
  modified_base 16: mod_base = OTHER; note = uracil
  source 1..29: mol_type = other DNA
ggtttagagactttctcaaaggcttagat

SEQ ID NO: 964 - DNA, 25 bp, synthetic construct
  misc_feature 1..25: note = Synthetic DNA primer, R460
  modified_base 7: mod_base = OTHER; note = uracil
  modified_base 17: mod_base = OTHER; note = uracil
  source 1..25: mol_type = other DNA
gtgttttcactgtctgtcacagaag

SEQ ID NO: 965 - DNA, 31 bp, synthetic construct
  misc_feature 1..31: note = Synthetic DNA primer, R461
  modified_base 13: mod_base = OTHER; note = uracil
  modified_base 25: mod_base = OTHER; note = uracil
  source 1..31: mol_type = other DNA
aaaactatcttcttcagaggtatctacaact

SEQ ID NO: 966 - DNA, 24 bp, synthetic construct
  misc_feature 1..24: note = Synthetic DNA primer, R462
  modified_base 7: mod_base = OTHER; note = uracil
  modified_base 18: mod_base = OTHER; note = uracil
  source 1..24: mol_type = other DNA
gtgacgtactgggtttttagcaag

SEQ ID NO: 967 - DNA, 27 bp, synthetic construct
  misc_feature 1..27: note = Synthetic DNA primer, R463
  modified_base 12: mod_base = OTHER; note = uracil
  modified_base 25: mod_base = OTHER; note = uracil
  source 1..27: mol_type = other DNA
ggcttctgatttgctacatttgaatct

SEQ ID NO: 968 - DNA, 31 bp, synthetic construct
  misc_feature 1..31: note = Synthetic DNA primer, R464
  modified_base 17: mod_base = OTHER; note = uracil
  modified_base 30: mod_base = OTHER; note = uracil
  source 1..31: mol_type = other DNA
aggtctttttctgaaatattttggtcacatg

SEQ ID NO: 969 - DNA, 26 bp, synthetic construct
  misc_feature 1..26: note = Synthetic DNA primer, R465
  modified_base 11: mod_base = OTHER; note = uracil
  modified_base 19: mod_base = OTHER; note = uracil
  source 1..26: mol_type = other DNA
agatattgcctgctttactgcaagaa

SEQ ID NO: 970 - DNA, 25 bp, synthetic construct
  misc_feature 1..25: note = Synthetic DNA primer, R466
  modified_base 12: mod_base = OTHER; note = uracil
  modified_base 19: mod_base = OTHER; note = uracil
  source 1..25: mol_type = other DNA
tgtatttccagtccactttcagagg

SEQ ID NO: 971 - DNA, 32 bp, synthetic construct
  misc_feature 1..32: note = Synthetic DNA primer, R467
  modified_base 13: mod_base = OTHER; note = uracil
  modified_base 26: mod_base = OTHER; note = uracil
  source 1..32: mol_type = other DNA
ttgttttctttttcaaagtggatattaaacct

SEQ ID NO: 972 - DNA, 32 bp, synthetic construct
  misc_feature 1..32: note = Synthetic DNA primer, R468
  modified_base 13: mod_base = OTHER; note = uracil
  modified_base 30: mod_base = OTHER; note = uracil
  source 1..32: mol_type = other DNA
cagaaggaatcgtcatctataaaactatatgt

SEQ ID NO: 973 - DNA, 32 bp, synthetic construct
  misc_feature 1..32: note = Synthetic DNA primer, R469
  modified_base 15: mod_base = OTHER; note = uracil
  modified_base 31: mod_base = OTHER; note = uracil
  source 1..32: mol_type = other DNA
ctgtagtttttccttattacattttgcttctt

SEQ ID NO: 974 - DNA, 28 bp, synthetic construct
  misc_feature 1..28: note = Synthetic DNA primer, R470
  modified_base 13: mod_base = OTHER; note = uracil
  modified_base 27: mod_base = OTHER; note = uracil
  source 1..28: mol_type = other DNA
tgggattgaaagtcagtatcactgtatt

SEQ ID NO: 975 - DNA, 28 bp, synthetic construct
  misc_feature 1..28: note = Synthetic DNA primer, R471
  modified_base 14: mod_base = OTHER; note = uracil
  modified_base 27: mod_base = OTHER; note = uracil
  source 1..28: mol_type = other DNA
gttacctttgagcttgtctgacattttg

SEQ ID NO: 976 - DNA, 31 bp, synthetic construct
  misc_feature 1..31: note = Synthetic DNA primer, R472
  modified_base 13: mod_base = OTHER; note = uracil
  modified_base 30: mod_base = OTHER; note = uracil
  source 1..31: mol_type = other DNA
ttggattactcttagatttgtgttttggttg

SEQ ID NO: 977 - DNA, 26 bp, synthetic construct
  misc_feature 1..26: note = Synthetic DNA primer, R473
  modified_base 13: mod_base = OTHER; note = uracil
  modified_base 25: mod_base = OTHER; note = uracil
  source 1..26: mol_type = other DNA
atggtagagttcttgaaaatgggttc

SEQ ID NO: 978 - DNA, 33 bp, synthetic construct
  misc_feature 1..33: note = Synthetic DNA primer, R474
  modified_base 16: mod_base = OTHER; note = uracil
  modified_base 32: mod_base = OTHER; note = uracil
  source 1..33: mol_type = other DNA
gtattttatctatattcaaggagatgtccgatt

SEQ ID NO: 979 - DNA, 27 bp, synthetic construct
  misc_feature 1..27: note = Synthetic DNA primer, R475
  modified_base 11: mod_base = OTHER; note = uracil
  modified_base 25: mod_base = OTHER; note = uracil
  source 1..27: mol_type = other DNA
gccttttggctaggtgttaaattatgg

SEQ ID NO: 980 - DNA, 22 bp, synthetic construct
  misc_feature 1..22: note = Synthetic DNA primer, R476
  modified_base 8: mod_base = OTHER; note = uracil
  modified_base 19: mod_base = OTHER; note = uracil
  source 1..22: mol_type = other DNA
gtctacctgaccaatcgatggg

SEQ ID NO: 981 - DNA, 24 bp, synthetic construct
  misc_feature 1..24: note = Synthetic DNA primer, R477
  modified_base 8: mod_base = OTHER; note = uracil
  modified_base 21: mod_base = OTHER; note = uracil
  source 1..24: mol_type = other DNA
agctttttgcagagcttcagtaga

SEQ ID NO: 982 - DNA, 29 bp, synthetic construct
  misc_feature 1..29: note = Synthetic DNA primer, R478
  modified_base 13: mod_base = OTHER; note = uracil
  modified_base 27: mod_base = OTHER; note = uracil
  source 1..29: mol_type = other DNA
ggccagataatttaagacatatgttgtgc

SEQ ID NO: 983 - DNA, 26 bp, synthetic construct
  misc_feature 1..26: note = Synthetic DNA primer, R479
  modified_base 10: mod_base = OTHER; note = uracil
  modified_base 24: mod_base = OTHER; note = uracil
  source 1..26: mol_type = other DNA
gctccgttttagtagcagttaactgt

SEQ ID NO: 984 - DNA, 30 bp, synthetic construct
  misc_feature 1..30: note = Synthetic DNA primer, R480
  modified_base 11: mod_base = OTHER; note = uracil
  modified_base 26: mod_base = OTHER; note = uracil
  source 1..30: mol_type = other DNA
gtctgtttcctcataacttagaatgtccat

SEQ ID NO: 985 - DNA, 26 bp, synthetic construct
  misc_feature 1..26: note = Synthetic DNA primer, R481
  modified_base 16: mod_base = OTHER; note = uracil
  modified_base 25: mod_base = OTHER; note = uracil
  source 1..26: mol_type = other DNA
tcactgtgcgaagacttttatgtcta

SEQ ID NO: 986 - DNA, 27 bp, synthetic construct
  misc_feature 1..27: note = Synthetic DNA primer, R482
  modified_base 11: mod_base = OTHER; note = uracil
  modified_base 25: mod_base = OTHER; note = uracil
  source 1..27: mol_type = other DNA
tttcactttgtccaaagattcctttgc

SEQ ID NO: 987 - DNA, 28 bp, synthetic construct
  misc_feature 1..28: note = Synthetic DNA primer, R483
  modified_base 12: mod_base = OTHER; note = uracil
  modified_base 25: mod_base = OTHER; note = uracil
  source 1..28: mol_type = other DNA
agaattctgcatttctttacactttggg

SEQ ID NO: 988 - DNA, 26 bp, synthetic construct
  misc_feature 1..26: note = Synthetic DNA primer, R484
  modified_base 10: mod_base = OTHER; note = uracil
  modified_base 22: mod_base = OTHER; note = uracil
  source 1..26: mol_type = other DNA
ggactgatttgtgtaacaagttgcag

SEQ ID NO: 989 - DNA, 32 bp, synthetic construct
  misc_feature 1..32: note = Synthetic DNA primer, R485
  modified_base 14: mod_base = OTHER; note = uracil
  modified_base 27: mod_base = OTHER; note = uracil
  source 1..32: mol_type = other DNA
tcatacaaataatttcctacataatctgcagt

SEQ ID NO: 990 - DNA, 28 bp, synthetic construct
  misc_feature 1..28: note = Synthetic DNA primer, R486
  modified_base 11: mod_base = OTHER; note = uracil
  modified_base 23: mod_base = OTHER; note = uracil
  source 1..28: mol_type = other DNA
caatactggctcaataccagaatcaagt

SEQ ID NO: 991 - DNA, 24 bp, synthetic construct
  misc_feature 1..24: note = Synthetic DNA primer, R487
  modified_base 10: mod_base = OTHER; note = uracil
  modified_base 21: mod_base = OTHER; note = uracil
  source 1..24: mol_type = other DNA
aacctgccataattttcgtttggc

SEQ ID NO: 992 - DNA, 28 bp, synthetic construct
  misc_feature 1..28: note = Synthetic DNA primer, R488
  modified_base 14: mod_base = OTHER; note = uracil
  modified_base 27: mod_base = OTHER; note = uracil
  source 1..28: mol_type = other DNA
gaagtttccaaactaacatcacaaggtg

SEQ ID NO: 993 - DNA, 26 bp, synthetic construct
  misc_feature 1..26: note = Synthetic DNA primer, R489
  modified_base 15: mod_base = OTHER; note = uracil
  modified_base 25: mod_base = OTHER; note = uracil
  source 1..26: mol_type = other DNA
atttcagaaaacacttgtcttgcgtt

SEQ ID NO: 994 - DNA, 28 bp, synthetic construct
  misc_feature 1..28: note = Synthetic DNA primer, R490
  modified_base 12: mod_base = OTHER; note = uracil
  modified_base 25: mod_base = OTHER; note = uracil
  source 1..28: mol_type = other DNA
accacattatatgaaaagcctttttggg

SEQ ID NO: 995 - DNA, 26 bp, synthetic construct
  misc_feature 1..26: note = Synthetic DNA primer, R491
  modified_base 3: mod_base = OTHER; note = uracil
  modified_base 12: mod_base = OTHER; note = uracil
  source 1..26: mol_type = other DNA
ggtttctcttatcaacacgaggaagt

SEQ ID NO: 996 - DNA, 28 bp, synthetic construct
  misc_feature 1..28: note = Synthetic DNA primer, R492
  modified_base 12: mod_base = OTHER; note = uracil
  modified_base 22: mod_base = OTHER; note = uracil
  source 1..28: mol_type = other DNA
ctgtcagttcatcatcttccataaaagc

SEQ ID NO: 997 - DNA, 31 bp, synthetic construct
  misc_feature 1..31: note = Synthetic DNA primer, R493
  modified_base 8: mod_base = OTHER; note = uracil
  modified_base 14: mod_base = OTHER; note = uracil
  source 1..31: mol_type = other DNA
tataccatacctatagagggagaacagatat

SEQ ID NO: 998 - DNA, 28 bp, synthetic construct
  misc_feature 1..28: note = Synthetic DNA primer, R494
  modified_base 13: mod_base = OTHER; note = uracil
  modified_base 26: mod_base = OTHER; note = uracil
  source 1..28: mol_type = other DNA
gcttgaagatttttccaaagtcagatgt

SEQ ID NO: 999 - DNA, 27 bp, synthetic construct
  misc_feature 1..27: note = Synthetic DNA primer, R495
  modified_base 11: mod_base = OTHER; note = uracil
  modified_base 23: mod_base = OTHER; note = uracil
  source 1..27: mol_type = other DNA
gttttgcttttgtctgttttcctccaa

SEQ ID NO: 1000 - DNA, 28 bp, synthetic construct
  misc_feature 1..28: note = Synthetic DNA primer, R496
  modified_base 14: mod_base = OTHER; note = uracil
  modified_base 26: mod_base = OTHER; note = uracil
  source 1..28: mol_type = other DNA
aggcaaaaattcatcacacaaattgtca

SEQ ID NO: 1001 - DNA, 23 bp, synthetic construct
  misc_feature 1..23: note = Synthetic DNA primer, R497
  modified_base 12: mod_base = OTHER; note = uracil
  modified_base 21: mod_base = OTHER; note = uracil
  source 1..23: mol_type = other DNA
tcattggagggtatgagccatcc

SEQ ID NO: 1002 - DNA, 21 bp, synthetic construct
  misc_feature 1..21: note = Synthetic DNA primer, F499
  modified_base 6: mod_base = OTHER; note = uracil
  modified_base 18: mod_base = OTHER; note = uracil
  source 1..21: mol_type = other DNA
acaactgcagcaaagactggt

SEQ ID NO: 1003 - RNA, 28 nt, synthetic construct
  misc_feature 1..28: note = Synthetic Primer, F500
  source 1..28: mol_type = other RNA
agttaattttggttacatccctctctgc

SEQ ID NO: 1004 - RNA, 25 nt, synthetic construct
  misc_feature 1..25: note = Synthetic Primer, F501
  source 1..25: mol_type = other RNA
atcgatctgttagaaacctctccag

SEQ ID NO: 1005 - DNA, 19 bp, synthetic construct
  misc_feature 1..19: note = Synthetic DNA primer, F502
  modified_base 5: mod_base = OTHER; note = uracil
  modified_base 7: mod_base = OTHER; note = uracil
  modified_base 9: mod_base = OTHER; note = uracil
  modified_base 14: mod_base = OTHER; note = uracil
  source 1..19: mol_type = other DNA
ggactctgtaggctgcagt

SEQ ID NO: 1006 - RNA, 22 nt, synthetic construct
  misc_feature 1..22: note = Synthetic Primer, F503
  source 1..22: mol_type = other RNA
tgaggcagtctttactcacctg

SEQ ID NO: 1007 - DNA, 28 bp, synthetic construct
  misc_feature 1..28: note = Synthetic DNA primer, F504
  modified_base 11: mod_base = OTHER; note = uracil
  modified_base 13: mod_base = OTHER; note = uracil
  modified_base 15: mod_base = OTHER; note = uracil
  modified_base 17: mod_base = OTHER; note = uracil
  modified_base 20: mod_base = OTHER; note = uracil
  modified_base 23..24: mod_base = OTHER; note = uracil
  modified_base 26: mod_base = OTHER; note = uracil
  source 1..28: mol_type = other DNA
acaagcaaagtctctatggtgattatgt

SEQ ID NO: 1008 - DNA, 25 bp, synthetic construct
  misc_feature 1..25: note = Synthetic DNA primer, F505
  modified_base 5: mod_base = OTHER; note = uracil
  modified_base 10: mod_base = OTHER; note = uracil
  source 1..25: mol_type = other DNA
caactaccatccagcaacagaaaat

SEQ ID NO: 1009 - RNA, 28 nt, synthetic construct
  misc_feature 1..28: note = Synthetic Primer, F506
  source 1..28: mol_type = other RNA
gacagatgagagaaatgcacttagaaga

SEQ ID NO: 1010 - RNA, 25 nt, synthetic construct
  misc_feature 1..25: note = Synthetic Primer, F507
  source 1..25: mol_type = other RNA
aggaatgtgtttctccatacaggtc

SEQ ID NO: 1011 - RNA, 24 nt, synthetic construct
  misc_feature 1..24: note = Synthetic Primer, F508
  source 1..24: mol_type = other RNA
cttcaagcagtgagaatacgtcca

SEQ ID NO: 1012 - RNA, 20 nt, synthetic construct
  misc_feature 1..20: note = Synthetic Primer, F509
  source 1..20: mol_type = other RNA
agggtccaggttcttccaga

SEQ ID NO: 1013 - RNA, 26 nt, synthetic construct
  misc_feature 1..26: note = Synthetic Primer, F510
  source 1..26: mol_type = other RNA
gatagttttgagagtcgttcgattgc

SEQ ID NO: 1014 - RNA, 21 nt, synthetic construct
  misc_feature 1..21: note = Synthetic Primer, F511
  source 1..21: mol_type = other RNA
ctccaccacctcctcaaacag

SEQ ID NO: 1015 - RNA, 18 nt, synthetic construct
  misc_feature 1..18: note = Synthetic Primer, F512
  source 1..18: mol_type = other RNA
atcagccaggcacaaagc

SEQ ID NO: 1016 - DNA, 28 bp, synthetic construct
  misc_feature 1..28: note = Synthetic DNA primer, F513
  modified_base 3: mod_base = OTHER; note = uracil
  modified_base 5..7: mod_base = OTHER; note = uracil
  modified_base 9: mod_base = OTHER; note = uracil
  modified_base 12: mod_base = OTHER; note = uracil
  modified_base 17: mod_base = OTHER; note = uracil
  modified_base 23: mod_base = OTHER; note = uracil
  source 1..28: mol_type = other DNA
catctttgtcatcagctgaagatgaaat

SEQ ID NO: 1017 - RNA, 29 nt, synthetic construct
  misc_feature 1..29: note = Synthetic Primer, F514
  source 1..29: mol_type = other RNA
gcctaaagaatcaaatgaaaaccaagaga

SEQ ID NO: 1018 - RNA, 18 nt, synthetic construct
  misc_feature 1..18: note = Synthetic Primer, F515
  source 1..18: mol_type = other RNA
gtgacccggagcacttcc

SEQ ID NO: 1019 - DNA, 26 bp, synthetic construct
  misc_feature 1..26: note = Synthetic DNA primer, F516
  modified_base 6..7: mod_base = OTHER; note = uracil
  modified_base 11: mod_base = OTHER; note = uracil
  modified_base 14..15: mod_base = OTHER; note = uracil
  modified_base 20: mod_base = OTHER; note = uracil
  source 1..26: mol_type = other DNA
ccacattacatacttaccatgccact

SEQ ID NO: 1020 - RNA, 18 nt, synthetic construct
  misc_feature 1..18: note = Synthetic Primer, F517
  source 1..18: mol_type = other RNA
atgggacccactccatcg

SEQ ID NO: 1021 - RNA, 22 nt, synthetic construct
  misc_feature 1..22: note = Synthetic Primer, F518
  source 1..22: mol_type = other RNA
cccttctaaggaccccctcttc

SEQ ID NO: 1022 - DNA, 20 bp, synthetic construct
  misc_feature 1..20: note = Synthetic DNA primer, F519
  modified_base 2: mod_base = OTHER; note = uracil
  modified_base 4: mod_base = OTHER; note = uracil
  modified_base 12..14: mod_base = OTHER; note = uracil
  modified_base 17: mod_base = OTHER; note = uracil
  modified_base 19: mod_base = OTHER; note = uracil
  source 1..20: mol_type = other DNA
ctctgccgggctttgatctt

SEQ ID NO: 1023 - DNA, 19 bp, synthetic construct
  misc_feature 1..19: note = Synthetic DNA primer, F520
  modified_base 1: mod_base = OTHER; note = uracil
  modified_base 4: mod_base = OTHER; note = uracil
  modified_base 11: mod_base = OTHER; note = uracil
  source 1..19: mol_type = other DNA
tactaccgcctcacacgct

SEQ ID NO: 1024 - RNA, 21 nt, synthetic construct
  misc_feature 1..21: note = Synthetic Primer, F521
  source 1..21: mol_type = other RNA
ttccctctctccttctgcctc

SEQ ID NO: 1025 - DNA, 25 bp, synthetic construct
  misc_feature 1..25: note = Synthetic Primer, F522
  source 1..25: mol_type = other DNA
ccagcagaagacaaaaagacaaaca

SEQ ID NO: 1026 - DNA, 21 bp, synthetic construct
  misc_feature 1..21: note = Synthetic DNA primer, F523
  modified_base 17: mod_base = OTHER; note = uracil
  source 1..21: mol_type = other DNA
ggagagggaggagagctaact

SEQ ID NO: 1027 - RNA, 22 nt, synthetic construct
  misc_feature 1..22: note = Synthetic Primer, F524
  source 1..22: mol_type = other RNA
agaagctgtgcatttacaccga

SEQ ID NO: 1028 - RNA, 24 nt, synthetic construct
  misc_feature 1..24: note = Synthetic Primer, F525
  source 1..24: mol_type = other RNA
ttttgctgatgctatgctctccac

SEQ ID NO: 1029 - RNA, 19 nt, synthetic construct
  misc_feature 1..19: note = Synthetic Primer, F526
  source 1..19: mol_type = other RNA
ctgatccgcaagcatgctc

SEQ ID NO: 1030 - RNA, 21 nt, synthetic construct
  misc_feature 1..21: note = Synthetic Primer, F527
  source 1..21: mol_type = other RNA
tgagctcgctcacttgtgatg

SEQ ID NO: 1031 - RNA, 23 nt, synthetic construct
  misc_feature 1..23: note = Synthetic Primer, F528
  source 1..23: mol_type = other RNA
caggatccaaattcgttctgtgc

SEQ ID NO: 1032 - DNA, 25 bp, synthetic construct
  misc_feature 1..25: note = Synthetic DNA primer, F529
  modified_base 1: mod_base = OTHER; note = uracil
  modified_base 4: mod_base = OTHER; note = uracil
  modified_base 11: mod_base = OTHER; note = uracil
  modified_base 13: mod_base = OTHER; note = uracil
  modified_base 16: mod_base = OTHER; note = uracil
  modified_base 18: mod_base = OTHER; note = uracil
  source 1..25: mol_type = other DNA
tactaacaactctggtctggaccat

SEQ ID NO: 1033 - RNA, 28 nt, synthetic construct
  misc_feature 1..28: note = Synthetic Primer, F530
  source 1..28: mol_type = other RNA
atgctatttggacaataaactcaccttg

SEQ ID NO: 1034 - RNA, 25 nt, synthetic construct
  misc_feature 1..25: note = Synthetic Primer, F531
  source 1..25: mol_type = other RNA
ctccttacctcatacagtgcagaaa

SEQ ID NO: 1035 - RNA, 20 nt, synthetic construct
  misc_feature 1..20: note = Synthetic Primer, F532
  source 1..20: mol_type = other RNA
ccctgagtgcagcttcgatc

SEQ ID NO: 1036 - RNA, 20 nt, synthetic construct
  misc_feature 1..20: note = Synthetic Primer, F533
  source 1..20: mol_type = other RNA
cgatcatggatggcgggtac

SEQ ID NO: 1037 - RNA, 22 nt, synthetic construct
  misc_feature 1..22: note = Synthetic Primer, F534
  source 1..22: mol_type = other RNA
tttatgaatggagaggctgctg

SEQ ID NO: 1038 - RNA, 26 nt, synthetic construct
  misc_feature 1..26: note = Synthetic Primer, F535
  source 1..26: mol_type = other RNA
acctctcacccttataagtcttctga

SEQ ID NO: 1039 - RNA, 21 nt, synthetic construct
  misc_feature 1..21: note = Synthetic Primer, F536
  source 1..21: mol_type = other RNA
acttgagcttccctaggacca

SEQ ID NO: 1040 - RNA, 20 nt, synthetic construct
  misc_feature 1..20: note = Synthetic Primer, F537
  source 1..20: mol_type = other RNA
gggagacaatacgtgtcggg

SEQ ID NO: 1041 - RNA, 23 nt, synthetic construct
  misc_feature 1..23: note = Synthetic Primer, F538
  source 1..23: mol_type = other RNA
aagacaggtagcgatccaggtag

SEQ ID NO: 1042 - RNA, 21 nt, synthetic construct
  misc_feature 1..21: note = Synthetic Primer, F539
  source 1..21: mol_type = other RNA
ctaggtgcccatgtccatctg

SEQ ID NO: 1043 - RNA, 23 nt, synthetic construct
  misc_feature 1..23: note = Synthetic Primer, F540
  source 1..23: mol_type = other RNA
gatgtccaatgtacctgaggcaa

SEQ ID NO: 1044 - RNA, 30 nt, synthetic construct
  misc_feature 1..30: note = Synthetic Primer, F541
  source 1..30: mol_type = other RNA
cagcagaaagaggactcagaatagaaaatc

SEQ ID NO: 1045 - RNA, 24 nt, synthetic construct
  misc_feature 1..24: note = Synthetic Primer, F542
  source 1..24: mol_type = other RNA
agagattcgcttgtgtgggttaaa

SEQ ID NO: 1046 - RNA, 21 nt, synthetic construct
  misc_feature 1..21: note = Synthetic Primer, F543
  source 1..21: mol_type = other RNA
accagggttaccttgatctcc

SEQ ID NO: 1047 - RNA, 24 nt, synthetic construct
  misc_feature 1..24: note = Synthetic Primer, F544
  source 1..24: mol_type = other RNA
acttctcaattgctacgggcaatc

SEQ ID NO: 1048 - DNA, 22 bp, synthetic construct
  misc_feature 1..22: note = Synthetic DNA primer, F545
  modified_base 4: mod_base = OTHER; note = uracil
  modified_base 6: mod_base = OTHER; note = uracil
  modified_base 10: mod_base = OTHER; note = uracil
  modified_base 17: mod_base = OTHER; note = uracil
  source 1..22: mol_type = other DNA
agatctcggtgaacgatgcaat

SEQ ID NO: 1049 - RNA, 24 nt, synthetic construct
  misc_feature 1..24: note = Synthetic Primer, F546
  source 1..24: mol_type = other RNA
tatgtggactgcagaagaacttcg

SEQ ID NO: 1050 - RNA, 25 nt, synthetic construct
  misc_feature 1..25: note = Synthetic Primer, F547
  source 1..25: mol_type = other RNA
tgtggtttatgaacaagcgatttgg

SEQ ID NO: 1051 - RNA, 24 nt, synthetic construct
  misc_feature 1..24: note = Synthetic Primer, F548
  source 1..24: mol_type = other RNA
gctcatatcgagaggtagccattc

SEQ ID NO: 1052 - RNA, 23 nt, synthetic construct
  misc_feature 1..23: note = Synthetic Primer, F549
  source 1..23: mol_type = other RNA
gcagacgagcttgacatcagaaa

SEQ ID NO: 1053 - RNA, 21 nt, synthetic construct
  misc_feature 1..21: note = Synthetic Primer, F550
  source 1..21: mol_type = other RNA
aagacttcgggtgctctgtac

SEQ ID NO: 1054 - RNA, 26 nt, synthetic construct
  misc_feature 1..26: note = Synthetic Primer, F551
  source 1..26: mol_type = other RNA
gggacagactgtcattcaaaatagga

SEQ ID NO: 1055 - RNA, 22 nt, synthetic construct
  misc_feature 1..22: note = Synthetic Primer, F552
  source 1..22: mol_type = other RNA
tgaagaaagtccagacctcgga

SEQ ID NO: 1056 - RNA, 23 nt, synthetic construct
  misc_feature 1..23: note = Synthetic Primer, F553
  source 1..23: mol_type = other RNA
gtcgactgcctgataagacatga

SEQ ID NO: 1057 - RNA, 26 nt, synthetic construct
  misc_feature 1..26: note = Synthetic Primer, F554
  source 1..26: mol_type = other RNA
tagtttggtttctctgtctgttcgtg

SEQ ID NO: 1058 - DNA, 19 bp, synthetic construct
  misc_feature 1..19: note = Synthetic DNA primer, F555
  modified_base 6: mod_base = OTHER; note = uracil
  modified_base 10: mod_base = OTHER; note = uracil
  modified_base 14: mod_base = OTHER; note = uracil
  source 1..19: mol_type = other DNA
aagcctccatcgctaccct

SEQ ID NO: 1059 - DNA, 17 bp, synthetic construct
  misc_feature 1..17: note = Synthetic DNA primer, F556
  modified_base 1: mod_base = OTHER; note = uracil
  modified_base 13: mod_base = OTHER; note = uracil
  source 1..17: mol_type = other DNA
tcaggcgccaagtaggt

SEQ ID NO: 1060 - RNA, 21 nt, synthetic construct
  misc_feature 1..21: note = Synthetic Primer, F557
  source 1..21: mol_type = other RNA
aaagcggctgttagtcactgg

SEQ ID NO: 1061 - RNA, 25 nt, synthetic construct
  misc_feature 1..25: note = Synthetic Primer, F558
  source 1..25: mol_type = other RNA
taaagatcatgtctcggctcaagga

SEQ ID NO: 1062 - RNA, 24 nt, synthetic construct
  misc_feature 1..24: note = Synthetic Primer, F559
  source 1..24: mol_type = other RNA
gtgcacaggttattctgatttccc

SEQ ID NO: 1063 - RNA, 21 nt, synthetic construct
  misc_feature 1..21: note = Synthetic Primer, F560
  source 1..21: mol_type = other RNA
agaagggctaggccaattgac

SEQ ID NO: 1064 - RNA, 24 nt, synthetic construct
  misc_feature 1..24: note = Synthetic Primer, F561
  source 1..24: mol_type = other RNA
gtcagcctgaacataacatccttg

SEQ ID NO: 1065 - RNA, 20 nt, synthetic construct
  misc_feature 1..20: note = Synthetic Primer, F562
  source 1..20: mol_type = other RNA
gggacctccggtcagaaaac

SEQ ID NO: 1066 - RNA, 21 nt, synthetic construct
  misc_feature 1..21: note = Synthetic Primer, F563
  source 1..21: mol_type = other RNA
ctcccaaccaagctctcttga

SEQ ID NO: 1067 - RNA, 27 nt, synthetic construct
  misc_feature 1..27: note = Synthetic Primer, F564
  source 1..27: mol_type = other RNA
cccagaaggtgagaaagttaaaattcc

SEQ ID NO: 1068 - RNA, 21 nt, synthetic construct
  misc_feature 1..21: note = Synthetic Primer, F565
  source 1..21: mol_type = other RNA
agggcatgaactacttggagg

SEQ ID NO: 1069 - RNA, 21 nt, synthetic construct
  misc_feature 1..21: note = Synthetic Primer, F566
  source 1..21: mol_type = other RNA
gcctctccctccctccaggaa

SEQ ID NO: 1070 - DNA, 17 bp, synthetic construct
  misc_feature 1..17: note = Synthetic DNA primer, F567
  modified_base 1: mod_base = OTHER; note = uracil
  modified_base 5: mod_base = OTHER; note = uracil
  modified_base 10: mod_base = OTHER; note = uracil
  source 1..17: mol_type = other DNA
tgcctcacctccaccgt

SEQ ID NO: 1071 - RNA, 21 nt, synthetic construct
  misc_feature 1..21: note = Synthetic Primer, F568
  source 1..21: mol_type = other RNA
aagtgtaagaagtgcgaaggg

SEQ ID NO: 1072 - RNA, 26 nt, synthetic construct
  misc_feature 1..26: note = Synthetic Primer, F569
  source 1..26: mol_type = other RNA
gcctttttaactggtagagattggtg

SEQ ID NO: 1073 - RNA, 24 nt, synthetic construct
  misc_feature 1..24: note = Synthetic Primer, F570
  source 1..24: mol_type = other RNA
tcatcaccttcctttcatgctctc

SEQ ID NO: 1074 - RNA, 22 nt, synthetic construct
  misc_feature 1..22: note = Synthetic Primer, F571
  source 1..22: mol_type = other RNA
tcctacgtggtgtgtgtctgaa

SEQ ID NO: 1075 - RNA, 25 nt, synthetic construct
  misc_feature 1..25: note = Synthetic Primer, F572
  source 1..25: mol_type = other RNA
tgatcatcgaattctccaaaatggc

SEQ ID NO: 1076 - RNA, 25 nt, synthetic construct
  misc_feature 1..25: note = Synthetic Primer, F573
  source 1..25: mol_type = other RNA
gatgagatgtggtacaagcattcca

SEQ ID NO: 1077 - DNA, 28 bp, synthetic construct
  misc_feature 1..28: note = Synthetic DNA primer, F574
  modified_base 5: mod_base = OTHER; note = uracil
  modified_base 12..13: mod_base = OTHER; note = uracil
  modified_base 15..16: mod_base = OTHER; note = uracil
  modified_base 24: mod_base = OTHER; note = uracil
  modified_base 26..27: mod_base = OTHER; note = uracil
  source 1..28: mol_type = other DNA
cccctacagcattgttaagaaagtattt

SEQ ID NO: 1078 - RNA, 20 nt, synthetic construct
  misc_feature 1..20: note = Synthetic Primer, F575
  source 1..20: mol_type = other RNA
ctgggactagcatgctgacc

SEQ ID NO: 1079 - DNA, 20 bp, synthetic construct
  misc_feature 1..20: note = Synthetic DNA primer, F576
  modified_base 2: mod_base = OTHER; note = uracil
  modified_base 6: mod_base = OTHER; note = uracil
  modified_base 8: mod_base = OTHER; note = uracil
  modified_base 10: mod_base = OTHER; note = uracil
  modified_base 12: mod_base = OTHER; note = uracil
  modified_base 15..16: mod_base = OTHER; note = uracil
  modified_base 18: mod_base = OTHER; note = uracil
  source 1..20: mol_type = other DNA
ctgcctgtctctggttctgt

SEQ ID NO: 1080 - RNA, 22 nt, synthetic construct
  misc_feature 1..22: note = Synthetic Primer, F577
  source 1..22: mol_type = other RNA
acttggagtgagtttggatggg

SEQ ID NO: 1081 - DNA, 26 bp, synthetic construct
  misc_feature 1..26: note = Synthetic DNA primer, F578
  modified_base 1: mod_base = OTHER; note = uracil
  modified_base 4: mod_base = OTHER; note = uracil
  modified_base 7: mod_base = OTHER; note = uracil
  modified_base 9: mod_base = OTHER; note = uracil
  modified_base 12..13: mod_base = OTHER; note = uracil
  modified_base 21: mod_base = OTHER; note = uracil
  modified_base 25: mod_base = OTHER; note = uracil
  source 1..26: mol_type = other DNA
tcctgatctccttagacaactacctt

SEQ ID NO: 1082 - RNA, 22 nt, synthetic construct
  misc_feature 1..22: note = Synthetic Primer, F579
  source 1..22: mol_type = other RNA
tgttcctatttcagccccactc

SEQ ID NO: 1083 - RNA, 23 nt, synthetic construct
  misc_feature 1..23: note = Synthetic Primer, F580
  source 1..23: mol_type = other RNA
ggaaagggtcctctgatcattgc

SEQ ID NO: 1084 - RNA, 20 nt, synthetic construct
  misc_feature 1..20: note = Synthetic Primer, F581
  source 1..20: mol_type = other RNA
cgagggccggtatacattcg

SEQ ID NO: 1085 - DNA, 24 bp, synthetic construct
  misc_feature 1..24: note = Synthetic DNA primer, F582
  modified_base 4: mod_base = OTHER; note = uracil
  modified_base 6: mod_base = OTHER; note = uracil
  modified_base 12..13: mod_base = OTHER; note = uracil
  modified_base 18: mod_base = OTHER; note = uracil
  source 1..24: mol_type = other DNA
gaatgtgaaaattccagtggccat

SEQ ID NO: 1086 - DNA, 21 bp, synthetic construct
  misc_feature 1..21: note = Synthetic DNA primer, F583
  modified_base 2: mod_base = OTHER; note = uracil
  modified_base 7: mod_base = OTHER; note = uracil
  modified_base 9: mod_base = OTHER; note = uracil
  modified_base 15: mod_base = OTHER; note = uracil
  modified_base 20: mod_base = OTHER; note = uracil
  source 1..21: mol_type = other DNA
ataccctctcagcgtaccctt

SEQ ID NO: 1087 - RNA, 19 nt, synthetic construct
  misc_feature 1..19: note = Synthetic Primer, F584
  source 1..19: mol_type = other RNA
agcgctttgtggtcatcca

SEQ ID NO: 1088 - RNA, 22 nt, synthetic construct
  misc_feature 1..22: note = Synthetic Primer, F585
  source 1..22: mol_type = other RNA
aaactagccctcaatccctgac

SEQ ID NO: 1089 - RNA, 23 nt, synthetic construct
  misc_feature 1..23: note = Synthetic Primer, F586
  source 1..23: mol_type = other RNA
cacagttggaggacttcctcttc

SEQ ID NO: 1090 - RNA, 22 nt, synthetic construct
  misc_feature 1..22: note = Synthetic Primer, F587
  source 1..22: mol_type = other RNA
ctacatgggtgcttcccattcc

SEQ ID NO: 1091 - RNA, 21 nt, synthetic construct
  misc_feature 1..21: note = Synthetic Primer, F588
  source 1..21: mol_type = other RNA
gtcctcgtggccatgaatgaa

SEQ ID NO: 1092 - RNA, 22 nt, synthetic construct
  misc_feature 1..22: note = Synthetic Primer, F589
  source 1..22: mol_type = other RNA
cccaatccccacaccaagtatc

SEQ ID NO: 1093 - DNA, 25 bp, synthetic construct
  misc_feature 1..25: note = Synthetic DNA primer, F590
  modified_base 2: mod_base = OTHER; note = uracil
  modified_base 4..5: mod_base = OTHER; note = uracil
  modified_base 8: mod_base = OTHER; note = uracil
  modified_base 12: mod_base = OTHER; note = uracil
  modified_base 15: mod_base = OTHER; note = uracil
  modified_base 17: mod_base = OTHER; note = uracil
  modified_base 19: mod_base = OTHER; note = uracil
  modified_base 22: mod_base = OTHER; note = uracil
  source 1..25: mol_type = other DNA
atgttcctccctcatctctaatggt

SEQ ID NO: 1094 - RNA, 22 nt, synthetic construct
  misc_feature 1..22: note = Synthetic Primer, F591
  source 1..22: mol_type = other RNA
tggactcgagcaacattgatgg

SEQ ID NO: 1095 - RNA, 21 nt, synthetic construct
  misc_feature 1..21: note = Synthetic Primer, F592
  source 1..21: mol_type = other RNA
gctgaagtaccagacctgcta

SEQ ID NO: 1096 - RNA, 23 nt, synthetic construct
  misc_feature 1..23: note = Synthetic Primer, F593
  source 1..23: mol_type = other RNA
ggatttgaccctccatgatcagg

SEQ ID NO: 1097 - RNA, 21 nt, synthetic construct
  misc_feature 1..21: note = Synthetic Primer, F594
  source 1..21: mol_type = other RNA
tcactctctctctgcgcattc

SEQ ID NO: 1098 - DNA, 21 bp, synthetic construct
  misc_feature 1..21: note = Synthetic DNA primer, F595
  modified_base 3: mod_base = OTHER; note = uracil
  modified_base 8: mod_base = OTHER; note = uracil
  modified_base 18: mod_base = OTHER; note = uracil
  source 1..21: mol_type = other DNA
catgaagtgcaagaacgtggt

SEQ ID NO: 1099 - RNA, 19 nt, synthetic construct
  misc_feature 1..19: note = Synthetic Primer, F596
  source 1..19: mol_type = other RNA
gcggatcagagcctcaaac

SEQ ID NO: 1100 - DNA, 28 bp, synthetic construct
  misc_feature 1..28: note = Synthetic DNA primer, F597
  modified_base 3: mod_base = OTHER; note = uracil
  modified_base 5: mod_base = OTHER; note = uracil
  modified_base 8: mod_base = OTHER; note = uracil
  modified_base 10..13: mod_base = OTHER; note = uracil
  modified_base 16: mod_base = OTHER; note = uracil
  modified_base 18: mod_base = OTHER; note = uracil
  modified_base 25..27: mod_base = OTHER; note = uracil
  source 1..28: mol_type = other DNA
actgtcctgttttgatatcccagatttt

SEQ ID NO: 1101 - RNA, 25 nt, synthetic construct
  misc_feature 1..25: note = Synthetic Primer, F598
  source 1..25: mol_type = other RNA
ctgtctcaatatcccaaaccctaag

SEQ ID NO: 1102 - RNA, 23 nt, synthetic construct
  misc_feature 1..23: note = Synthetic Primer, F599
  source 1..23: mol_type = other RNA
tattagtatgcccctgcaacgtg

SEQ ID NO: 1103 - RNA, 23 nt, synthetic construct
  misc_feature 1..23: note = Synthetic Primer, F600
  source 1..23: mol_type = other RNA
caaccctcctgccatcatattga

SEQ ID NO: 1104 - RNA, 26 nt, synthetic construct
  misc_feature 1..26: note = Synthetic Primer, F601
  source 1..26: mol_type = other RNA
caaccatgacaagattttcccttacc

SEQ ID NO: 1105 - RNA, 21 nt, synthetic construct
  misc_feature 1..21: note = Synthetic Primer, F602
  source 1..21: mol_type = other RNA
tgcctgtggaggaacttttca

SEQ ID NO: 1106 - RNA, 19 nt, synthetic construct
  misc_feature 1..19: note = Synthetic Primer, F603
  source 1..19: mol_type = other RNA
cttcctctcgcccatcaca

SEQ ID NO: 1107 - DNA, 20 bp, synthetic construct
  misc_feature 1..20: note = Synthetic DNA primer, F604
  modified_base 3: mod_base = OTHER; note = uracil
  modified_base 7: mod_base = OTHER; note = uracil
  modified_base 10: mod_base = OTHER; note = uracil
  modified_base 12: mod_base = OTHER; note = uracil
  modified_base 17: mod_base = OTHER; note = uracil
  modified_base 19: mod_base = OTHER; note = uracil
  source 1..20: mol_type = other DNA
agtgcctcctctcccatctt

SEQ ID NO: 1108 - RNA, 25 nt, synthetic construct
  misc_feature 1..25: note = Synthetic Primer, F605
  source 1..25: mol_type = other RNA
cactccttgcttctcagatgaaacc

SEQ ID NO: 1109 - RNA, 19 nt, synthetic construct
  misc_feature 1..19: note = Synthetic Primer, F606
  source 1..19: mol_type = other RNA
caggtactcccgcaggttg

SEQ ID NO: 1110 - RNA, 21 nt, synthetic construct
  misc_feature 1..21: note = Synthetic Primer, F607
  source 1..21: mol_type = other RNA
cacgcatacggtttggtttgg

SEQ ID NO: 1111 - DNA, 24 bp, synthetic construct
  misc_feature 1..24: note = Synthetic DNA primer, F608
  modified_base 2: mod_base = OTHER; note = uracil
  modified_base 9: mod_base = OTHER; note = uracil
  modified_base 11: mod_base = OTHER; note = uracil
  modified_base 13: mod_base = OTHER; note = uracil
  modified_base 15: mod_base = OTHER; note = uracil
  source 1..24: mol_type = other DNA
ctagaagctctctatcccacacct

SEQ ID NO: 1112 - RNA, 25 nt, synthetic construct
  misc_feature 1..25: note = Synthetic Primer, F609
  source 1..25: mol_type = other RNA
caaggaatgccttcaaaaagttggg

SEQ ID NO: 1113 - RNA, 23 nt, synthetic construct
  misc_feature 1..23: note = Synthetic Primer, F610
  source 1..23: mol_type = other RNA
agatgatgatctccaggtacagg

SEQ ID NO: 1114 - DNA, 21 bp, synthetic construct
  misc_feature 1..21: note = Synthetic DNA primer, F611
  modified_base 7: mod_base = OTHER; note = uracil
  modified_base 11: mod_base = OTHER; note = uracil
  modified_base 16..18: mod_base = OTHER; note = uracil
  modified_base 20: mod_base = OTHER; note = uracil
  source 1..21: mol_type = other DNA
cggcactgcatgcaatttctt

SEQ ID NO: 1115 - RNA, 26 nt, synthetic construct
  misc_feature 1..26: note = Synthetic Primer, F612
  source 1..26: mol_type = other RNA
ccatttatagctgagtctccatcctg

SEQ ID NO: 1116 - DNA, 23 bp, synthetic construct
  misc_feature 1..23: note = Synthetic DNA primer, F613
  modified_base 6..7: mod_base = OTHER; note = uracil
  modified_base 9: mod_base = OTHER; note = uracil
  modified_base 13: mod_base = OTHER; note = uracil
  modified_base 17..19: mod_base = OTHER; note = uracil
  source 1..23: mol_type = other DNA
cccagttgtgggtacctttagat

SEQ ID NO: 1117 - RNA, 26 nt, synthetic construct
  misc_feature 1..26: note = Synthetic Primer, F614
  source 1..26: mol_type = other RNA
ctttcaaacgagtcaagcaagaatgg

SEQ ID NO: 1118 - DNA, 23 bp, synthetic construct
  misc_feature 1..23: note = Synthetic DNA primer, F615
  modified_base 8..10: mod_base = OTHER; note = uracil
  modified_base 14: mod_base = OTHER; note = uracil
  modified_base 17: mod_base = OTHER; note = uracil
  source 1..23: mol_type = other DNA
accacactttccataatgaggct

SEQ ID NO: 1119 - RNA, 25 nt, synthetic construct
  misc_feature 1..25: note = Synthetic Primer, F616
  source 1..25: mol_type = other RNA
cttttccatcttttctgtgttggtc

SEQ ID NO: 1120 - RNA, 25 nt, synthetic construct
  misc_feature 1..25: note = Synthetic Primer, F617
  source 1..25: mol_type = other RNA
cagacaaatcccaaaacaaacctga

SEQ ID NO: 1121 - RNA, 24 nt, synthetic construct
  misc_feature 1..24: note = Synthetic Primer, F618
  source 1..24: mol_type = other RNA
gtagctacaggactcagatacgtg

SEQ ID NO: 1122 - RNA, 24 nt, synthetic construct
  misc_feature 1..24: note = Synthetic Primer, F619
  source 1..24: mol_type = other RNA
gtatttgggcgaatgcagtttttc

SEQ ID NO: 1123 - RNA, 26 nt, synthetic construct
  misc_feature 1..26: note = Synthetic Primer, F620
  source 1..26: mol_type = other RNA
ccagagaaaagagagttactcacaca

SEQ ID NO: 1124 - RNA, 24 nt, synthetic construct
  misc_feature 1..24: note = Synthetic Primer, F621
  source 1..24: mol_type = other RNA
actgtgttactgccatcgacttac

SEQ ID NO: 1125 - DNA, 22 bp, synthetic construct
  misc_feature 1..22: note = Synthetic DNA primer, F622
  modified_base 3: mod_base = OTHER; note = uracil
  modified_base 5..6: mod_base = OTHER; note = uracil
  modified_base 8: mod_base = OTHER; note = uracil
  modified_base 15..16: mod_base = OTHER; note = uracil
  modified_base 20..21: mod_base = OTHER; note = uracil
  source 1..22: mol_type = other DNA
ggtattctcggaggttgccttt

SEQ ID NO: 1126 - RNA, 22 nt, synthetic construct
  misc_feature 1..22: note = Synthetic Primer, F623
  source 1..22: mol_type = other RNA
cttggtcgtgttcttcattcgg

SEQ ID NO: 1127 - RNA, 19 nt, synthetic construct
  misc_feature 1..19: note = Synthetic Primer, F624
  source 1..19: mol_type = other RNA
accactgtggaggcatttg

SEQ ID NO: 1128 - RNA, 25 nt, synthetic construct
  misc_feature 1..25: note = Synthetic Primer, F625
  source 1..25: mol_type = other RNA
agtgaagatctcccacattaacacc

SEQ ID NO: 1129 - RNA, 21 nt, synthetic construct
  misc_feature 1..21: note = Synthetic Primer, F626
  source 1..21: mol_type = other RNA
cttgcccaaagcaaccttctc

SEQ ID NO: 1130 - DNA, 19 bp, synthetic construct
  misc_feature 1..19: note = Synthetic DNA primer, F627
  modified_base 2..3: mod_base = OTHER; note = uracil
  modified_base 6..7: mod_base = OTHER; note = uracil
  modified_base 15: mod_base = OTHER; note = uracil
  modified_base 17: mod_base = OTHER; note = uracil
  source 1..19: mol_type = other DNA
attggttgcggccatctct

SEQ ID NO: 1131 - RNA, 20 nt, synthetic construct
  misc_feature 1..20: note = Synthetic Primer, F628
  source 1..20: mol_type = other RNA
accaatttcataggcgtggc

SEQ ID NO: 1132 - RNA, 20 nt, synthetic construct
  misc_feature 1..20: note = Synthetic Primer, F629
  source 1..20: mol_type = other RNA
gcctatcgctctgctctctc

SEQ ID NO: 1133 - RNA, 21 nt, synthetic construct
  misc_feature 1..21: note = Synthetic Primer, F630
  source 1..21: mol_type = other RNA
taacccagcgacgaactttcc

SEQ ID NO: 1134 - RNA, 18 nt, synthetic construct
  misc_feature 1..18: note = Synthetic Primer, F631
  source 1..18: mol_type = other RNA
gcccctgagcgtcatctg

SEQ ID NO: 1135 - RNA, 17 nt, synthetic construct
  misc_feature 1..17: note = Synthetic Primer, F632
  source 1..17: mol_type = other RNA
ctggtggaggctgacga

SEQ ID NO: 1136 - RNA, 22 nt, synthetic construct
  misc_feature 1..22: note = Synthetic Primer, F633
  source 1..22: mol_type = other RNA
acaacgtgatgaagatcgcaga

SEQ ID NO: 1137 - RNA, 19 nt, synthetic construct
  misc_feature 1..19: note = Synthetic Primer, F634
  source 1..19: mol_type = other RNA
gggagatcttcacgctggg

SEQ ID NO: 1138 - DNA, 17 bp, synthetic construct
  misc_feature 1..17: note = Synthetic DNA primer, F635
  modified_base 2: mod_base = OTHER; note = uracil
  modified_base 4: mod_base = OTHER; note = uracil
  modified_base 15: mod_base = OTHER; note = uracil
  source 1..17: mol_type = other DNA
gtctgaggagcccgtgt

SEQ ID NO: 1139 - RNA, 18 nt, synthetic construct
  misc_feature 1..18: note = Synthetic Primer, F636
  source 1..18: mol_type = other RNA
tcctcggagcagtgaggg

SEQ ID NO: 1140 - RNA, 19 nt, synthetic construct
  misc_feature 1..19: note = Synthetic Primer, F637
  source 1..19: mol_type = other RNA
agcctctccacgctccctc

SEQ ID NO: 1141 - RNA, 23 nt, synthetic construct
  misc_feature 1..23: note = Synthetic Primer, F638
  source 1..23: mol_type = other RNA
ctcacattgcccctgacaacata

SEQ ID NO: 1142 - RNA, 23 nt, synthetic construct
  misc_feature 1..23: note = Synthetic Primer, F639
  source 1..23: mol_type = other RNA
gtgtcctttcaggatggtggatg

SEQ ID NO: 1143 - RNA, 26 nt, synthetic construct
  misc_feature 1..26: note = Synthetic Primer, F640
  source 1..26: mol_type = other RNA
ggtgacattttcaaagcagtgtatcc

SEQ ID NO: 1144 - RNA, 22 nt, synthetic construct
  misc_feature 1..22: note = Synthetic Primer, F641
  source 1..22: mol_type = other RNA
gggtattcgatgatccctgtgg

SEQ ID NO: 1145 - DNA, 19 bp, synthetic construct
  misc_feature 1..19: note = Synthetic DNA primer, F642
  modified_base 3: mod_base = OTHER; note = uracil
  modified_base 15: mod_base = OTHER; note = uracil
  modified_base 17..18: mod_base = OTHER; note = uracil
  source 1..19: mol_type = other DNA
cctccccaccagcatgttt

SEQ ID NO: 1146 - RNA, 22 nt, synthetic construct
  misc_feature 1..22: note = Synthetic Primer, F643
  source 1..22: mol_type = other RNA
ggctttggtgagatccattgac

SEQ ID NO: 1147 - DNA, 19 bp, synthetic construct
  misc_feature 1..19: note = Synthetic DNA primer, F644
  modified_base 4: mod_base = OTHER; note = uracil
  modified_base 6: mod_base = OTHER; note = uracil
  modified_base 9: mod_base = OTHER; note = uracil
  modified_base 12: mod_base = OTHER; note = uracil
  source 1..19: mol_type = other DNA
gcatgtactggtcccgcat

SEQ ID NO: 1148 - RNA, 21 nt, synthetic construct
  misc_feature 1..21: note = Synthetic Primer, F645
  source 1..21: mol_type = other RNA
tggttctggatcagctggatg

SEQ ID NO: 1149 - RNA, 23 nt, synthetic construct
  misc_feature 1..23: note = Synthetic Primer, R646
  source 1..23: mol_type = other RNA
tgccaacatgacttacttgatcc

SEQ ID NO: 1150 - DNA, 22 bp, synthetic construct
  misc_feature 1..22: note = Synthetic DNA primer, F647
  modified_base 5: mod_base = OTHER; note = uracil
  modified_base 11: mod_base = OTHER; note = uracil
  modified_base 16: mod_base = OTHER; note = uracil
  modified_base 18..21: mod_base = OTHER; note = uracil
  source 1..22: mol_type = other DNA
ggactaggcgtgggatgttttt

SEQ ID NO: 1151 - RNA, 19 nt, synthetic construct
  misc_feature 1..19: note = Synthetic Primer, F648
  source 1..19: mol_type = other RNA
agtggatcccctctccacc

SEQ ID NO: 1152 - DNA, 25 bp, synthetic construct
  misc_feature 1..25: note = Synthetic DNA primer, F649
  modified_base 5..8: mod_base = OTHER; note = uracil
  modified_base 16: mod_base = OTHER; note = uracil
  modified_base 18: mod_base = OTHER; note = uracil
  modified_base 23: mod_base = OTHER; note = uracil
  source 1..25: mol_type = other DNA
gaggttttccagcactctgacatat

SEQ ID NO: 1153 - RNA, 24 nt, synthetic construct
  misc_feature 1..24: note = Synthetic Primer, F650
  source 1..24: mol_type = other RNA
cggttgaatgtaaggcttacaacg

SEQ ID NO: 1154 - RNA, 20 nt, synthetic construct
  misc_feature 1..20: note = Synthetic Primer, F651
  source 1..20: mol_type = other RNA
gaacgggaagccctcatgtc

SEQ ID NO: 1155 - RNA, 25 nt, synthetic construct
  misc_feature 1..25: note = Synthetic Primer, F652
  source 1..25: mol_type = other RNA
ccttactcatggtcggatcacaaag

SEQ ID NO: 1156 - RNA, 20 nt, synthetic construct
  misc_feature 1..20: note = Synthetic Primer, F653
  source 1..20: mol_type = other RNA
ccctttctccccacagaaac

SEQ ID NO: 1157 - RNA, 22 nt, synthetic construct
  misc_feature 1..22: note = Synthetic Primer, F654
  source 1..22: mol_type = other RNA
gtagagcaaatccatccccaca

SEQ ID NO: 1158 - RNA, 19 nt, synthetic construct
  misc_feature 1..19: note = Synthetic Primer, F655
  source 1..19: mol_type = other RNA
tgtgcttttagggcccacc

SEQ ID NO: 1159 - DNA, 29 bp, synthetic construct
  misc_feature 1..29: note = Synthetic DNA primer, F656
  modified_base 1: mod_base = OTHER; note = uracil
  modified_base 3: mod_base = OTHER; note = uracil
  modified_base 5..6: mod_base = OTHER; note = uracil
  modified_base 10..13: mod_base = OTHER; note = uracil
  modified_base 15..16: mod_base = OTHER; note = uracil
  modified_base 21..22: mod_base = OTHER; note = uracil
  modified_base 24: mod_base = OTHER; note = uracil
  modified_base 28: mod_base = OTHER; note = uracil
  source 1..29: mol_type = other DNA
tctgttcaattttgttgagcttctgaatt

SEQ ID NO: 1160 - DNA, 27 bp, synthetic construct
  misc_feature 1..27: note = Synthetic DNA primer, F657
  modified_base 1: mod_base = OTHER; note = uracil
  modified_base 5: mod_base = OTHER; note = uracil
  modified_base 7..8: mod_base = OTHER; note = uracil
  modified_base 11..12: mod_base = OTHER; note = uracil
  modified_base 16: mod_base = OTHER; note = uracil
  modified_base 18: mod_base = OTHER; note = uracil
  modified_base 20..21: mod_base = OTHER; note = uracil
  modified_base 23: mod_base = OTHER; note = uracil
  modified_base 25..26: mod_base = OTHER; note = uracil
  source 1..27: mol_type = other DNA
tcagtgttacttacctgtcttgtcttt

SEQ ID NO: 1161 - RNA, 24 nt, synthetic construct
  misc_feature 1..24: note = Synthetic Primer, F658
  source 1..24: mol_type = other RNA
tgaattagctgtatcgtcaaggca

SEQ ID NO: 1162 - RNA, 25 nt, synthetic construct
  misc_feature 1..25: note = Synthetic Primer, F659
  source 1..25: mol_type = other RNA
tgtttctcccttctcaggattccta

SEQ ID NO: 1163 - RNA, 18 nt, synthetic construct
  misc_feature 1..18: note = Synthetic Primer, F660
  source 1..18: mol_type = other RNA
aaacccgcaatccggaac

SEQ ID NO: 1164 - RNA, 23 nt, synthetic construct
  misc_feature 1..23: note = Synthetic Primer, F661
  source 1..23: mol_type = other RNA
ccctccaacatcctagtcaactc

SEQ ID NO: 1165 - RNA, 22 nt, synthetic construct
  misc_feature 1..22: note = Synthetic Primer, F662
  source 1..22: mol_type = other RNA
gctagagcttgatgagcagcag

SEQ ID NO: 1166 - RNA, 20 nt, synthetic construct
  misc_feature 1..20: note = Synthetic Primer, F663
  source 1..20: mol_type = other RNA
ccatggagtcgatgagctgg

SEQ ID NO: 1167 - RNA, 21 nt, synthetic construct
  misc_feature 1..21: note = Synthetic Primer, F664
  source 1..21: mol_type = other RNA
gcccagctctgagatcctttc

SEQ ID NO: 1168 - RNA, 25 nt, synthetic construct
  misc_feature 1..25: note = Synthetic Primer, F665
  source 1..25: mol_type = other RNA
catttctgacaactgaactgctctc

SEQ ID NO: 1169 - RNA, 26 nt, synthetic construct
  misc_feature 1..26: note = Synthetic Primer, F666
  source 1..26: mol_type = other RNA
ttaccagcttgttcatgtctggattc

SEQ ID NO: 1170 - DNA, 26 bp, synthetic construct
  misc_feature 1..26: note = Synthetic DNA primer, F667
  modified_base 3: mod_base = OTHER; note = uracil
  modified_base 8..9: mod_base = OTHER; note = uracil
  modified_base 11..12: mod_base = OTHER; note = uracil
  modified_base 17: mod_base = OTHER; note = uracil
  modified_base 23: mod_base = OTHER; note = uracil
  modified_base 25: mod_base = OTHER; note = uracil
  source 1..26: mol_type = other DNA
actgagcttgttggaataaggatgtt

SEQ ID NO: 1171 - RNA, 22 nt, synthetic construct
  misc_feature 1..22: note = Synthetic Primer, F668
  source 1..22: mol_type = other RNA
ttgtaagtgcccgaagtgtaag

SEQ ID NO: 1172 - RNA, 25 nt, synthetic construct
  misc_feature 1..25: note = Synthetic Primer, F669
  source 1..25: mol_type = other RNA
tacgcagtgctaaccaagttctttc

SEQ ID NO: 1173 - RNA, 24 nt, synthetic construct
  misc_feature 1..24: note = Synthetic Primer, F670
  source 1..24: mol_type = other RNA
cagtcaaggttgctgattttggtc

SEQ ID NO: 1174 - RNA, 26 nt, synthetic construct
  misc_feature 1..26: note = Synthetic Primer, F671
  source 1..26: mol_type = other RNA
tatggatgttgccaagctgtattctg

SEQ ID NO: 1175 - DNA, 25 bp, synthetic construct
  misc_feature 1..25: note = Synthetic DNA primer, F672
  modified_base 3: mod_base = OTHER; note = uracil
  modified_base 6: mod_base = OTHER; note = uracil
  modified_base 9: mod_base = OTHER; note = uracil
  modified_base 14: mod_base = OTHER; note = uracil
  modified_base 18: mod_base = OTHER; note = uracil
  source 1..25: mol_type = other DNA
ggtggtcctaccatacatgaaacat

SEQ ID NO: 1176 - RNA, 25 nt, synthetic construct
  misc_feature 1..25: note = Synthetic Primer, F673
  source 1..25: mol_type = other RNA
gcaagcaaaaagtttgtccacagag

SEQ ID NO: 1177 - DNA, 23 bp, synthetic construct
  misc_feature 1..23: note = Synthetic DNA primer, F674
  modified_base 4: mod_base = OTHER; note = uracil
  modified_base 6: mod_base = OTHER; note = uracil
  modified_base 8: mod_base = OTHER; note = uracil
  modified_base 13: mod_base = OTHER; note = uracil
  modified_base 16: mod_base = OTHER; note = uracil
  modified_base 18: mod_base = OTHER; note = uracil
  modified_base 20: mod_base = OTHER; note = uracil
  source 1..23: mol_type = other DNA
acatctctcacctcatctgtcct

SEQ ID NO: 1178 - RNA, 20 nt, synthetic construct
  misc_feature 1..20: note = Synthetic Primer, F675
  source 1..20: mol_type = other RNA
tccctgtagtcccggatgag

SEQ ID NO: 1179 - RNA, 25 nt, synthetic construct
  misc_feature 1..25: note = Synthetic Primer, F676
  source 1..25: mol_type = other RNA
aattgttgccatttcagggtttctg

SEQ ID NO: 1180 - RNA, 26 nt, synthetic construct
  misc_feature 1..26: note = Synthetic Primer, F677
  source 1..26: mol_type = other RNA
ctcacctatctcccaggcctaaaata

SEQ ID NO: 1181 - RNA, 22 nt, synthetic construct
  misc_feature 1..22: note = Synthetic Primer, F678
  source 1..22: mol_type = other RNA
acaaacgagatgcctcttccag

SEQ ID NO: 1182 - RNA, 21 nt, synthetic construct
  misc_feature 1..21: note = Synthetic Primer, F679
  source 1..21: mol_type = other RNA
ggctgtcgtggtagacttaga

SEQ ID NO: 1183 - RNA, 24 nt, synthetic construct
  misc_feature 1..24: note = Synthetic Primer, F680
  source 1..24: mol_type = other RNA
ctgagtgtatcctggaggttgttg

SEQ ID NO: 1184 - RNA, 26 nt, synthetic construct
  misc_feature 1..26: note = Synthetic Primer, F681
  source 1..26: mol_type = other RNA
gcttggttctgatgtttgtagtgtag

SEQ ID NO: 1185 - DNA, 25 bp, synthetic construct
  misc_feature 1..25: note = Synthetic DNA primer, F682
  modified_base 1: mod_base = OTHER; note = uracil
  modified_base 4..5: mod_base = OTHER; note = uracil
  modified_base 7..8: mod_base = OTHER; note = uracil
  modified_base 11: mod_base = OTHER; note = uracil
  modified_base 13: mod_base = OTHER; note = uracil
  modified_base 17..20: mod_base = OTHER; note = uracil
  modified_base 22..23: mod_base = OTHER; note = uracil
  source 1..25: mol_type = other DNA
tccttgttggtgtccattttcttgt

SEQ ID NO: 1186 - RNA, 24 nt, synthetic construct
  misc_feature 1..24: note = Synthetic Primer, F683
  source 1..24: mol_type = other RNA
acatgccatcattctaggaagctc

SEQ ID NO: 1187 - RNA, 21 nt, synthetic construct
  misc_feature 1..21: note = Synthetic Primer, F684
  source 1..21: mol_type = other RNA
caggacccgcttctctgaaag

SEQ ID NO: 1188 - RNA, 24 nt, synthetic construct
  misc_feature 1..24: note = Synthetic Primer, F685
  source 1..24: mol_type = other RNA
aagacccctttaactcaagactgc

SEQ ID NO: 1189 - RNA, 19 nt, synthetic construct
  misc_feature 1..19: note = Synthetic Primer, F686
  source 1..19: mol_type = other RNA
tgctccatgaggagacacc

SEQ ID NO: 1190 - DNA, 29 bp, synthetic construct
  misc_feature 1..29: note = Synthetic DNA primer, F687
  modified_base 3: mod_base = OTHER; note = uracil
  modified_base 5: mod_base = OTHER; note = uracil
  modified_base 10..11: mod_base = OTHER; note = uracil
  modified_base 14: mod_base = OTHER; note = uracil
  modified_base 22: mod_base = OTHER; note = uracil
  modified_base 25..27: mod_base = OTHER; note = uracil
  source 1..29: mol_type = other DNA
aatgtaaccttgctaaaggagtgatttct

SEQ ID NO: 1191 - RNA, 29 nt, synthetic construct
  misc_feature 1..29: note = Synthetic Primer, F688
  source 1..29: mol_type = other RNA
aactggcaaatatatcattgagccaaatc

SEQ ID NO: 1192 - RNA, 26 nt, synthetic construct
  misc_feature 1..26: note = Synthetic Primer, F689
  source 1..26: mol_type = other RNA
ggtgtgaaatgactgagtacaaactg

SEQ ID NO: 1193 - DNA, 25 bp, synthetic construct
  misc_feature 1..25: note = Synthetic DNA primer, F690
  modified_base 2: mod_base = OTHER; note = uracil
  modified_base 5: mod_base = OTHER; note = uracil
  modified_base 12: mod_base = OTHER; note = uracil
  modified_base 14..16: mod_base = OTHER; note = uracil
  modified_base 18..19: mod_base = OTHER; note = uracil
  source 1..25: mol_type = other DNA
atggtgaaacctgtttgttggacat

SEQ ID NO: 1194 - RNA, 25 nt, synthetic construct
  misc_feature 1..25: note = Synthetic Primer, F691
  source 1..25: mol_type = other RNA
cctgctcatggtctttgagtatatg

SEQ ID NO: 1195 - RNA, 19 nt, synthetic construct
  misc_feature 1..19: note = Synthetic Primer, F692
  source 1..19: mol_type = other RNA
gccacacgcaactgtctag

SEQ ID NO: 1196 - RNA, 25 nt, synthetic construct
  misc_feature 1..25: note = Synthetic Primer, F693
  source 1..25: mol_type = other RNA
gacaatccttgcttacctgaggaac

SEQ ID NO: 1197 - DNA, 23 bp, synthetic construct
  misc_feature 1..23: note = Synthetic DNA primer, F694
  modified_base 3: mod_base = OTHER; note = uracil
  modified_base 9: mod_base = OTHER; note = uracil
  modified_base 13: mod_base = OTHER; note = uracil
  modified_base 15: mod_base = OTHER; note = uracil
  modified_base 17: mod_base = OTHER; note = uracil
  modified_base 20: mod_base = OTHER; note = uracil
  source 1..23: mol_type = other DNA
gctcgggatccatatgtggtaat

SEQ ID NO: 1198 - DNA, 22 bp, synthetic construct
  misc_feature 1..22: note = Synthetic DNA primer, F695
  modified_base 6: mod_base = OTHER; note = uracil
  modified_base 8: mod_base = OTHER; note = uracil
  modified_base 11..12: mod_base = OTHER; note = uracil
  modified_base 19..21: mod_base = OTHER; note = uracil
  source 1..22: mol_type = other DNA
ggccctatacttaggccctttt

SEQ ID NO: 1199 - DNA, 17 bp, synthetic construct
  misc_feature 1..17: note = Synthetic DNA primer, F696
  modified_base 4: mod_base = OTHER; note = uracil
  modified_base 10: mod_base = OTHER; note = uracil
  modified_base 14: mod_base = OTHER; note = uracil
  source 1..17: mol_type = other DNA
aactcacggtggctgct

SEQ ID NO: 1200 - RNA, 25 nt, synthetic construct
  misc_feature 1..25: note = Synthetic Primer, F697
  source 1..25: mol_type = other RNA
tgtcctggtcatttatagaaaccga

SEQ ID NO: 1201 - DNA, 28 bp, synthetic construct
  misc_feature 1..28: note = Synthetic DNA primer, F698
  modified_base 1: mod_base = OTHER; note = uracil
  modified_base 3: mod_base = OTHER; note = uracil
  modified_base 6: mod_base = OTHER; note = uracil
  modified_base 8: mod_base = OTHER; note = uracil
  modified_base 10: mod_base = OTHER; note = uracil
  modified_base 15: mod_base = OTHER; note = uracil
  modified_base 21: mod_base = OTHER; note = uracil
  modified_base 24: mod_base = OTHER; note = uracil
  source 1..28: mol_type = other DNA
tctcatgtctgaactgaagataatgact

SEQ ID NO: 1202 - DNA, 24 bp, synthetic construct
  misc_feature 1..24: note = Synthetic DNA primer, F699
  modified_base 1..2: mod_base = OTHER; note = uracil
  modified_base 5: mod_base = OTHER; note = uracil
  modified_base 9: mod_base = OTHER; note = uracil
  modified_base 14: mod_base = OTHER; note = uracil
  modified_base 19: mod_base = OTHER; note = uracil
  modified_base 22: mod_base = OTHER; note = uracil
  source 1..24: mol_type = other DNA
ttggtagctcagctggactgatat

SEQ ID NO: 1203 - RNA, 24 nt, synthetic construct
  misc_feature 1..24: note = Synthetic Primer, F700
  source 1..24: mol_type = other RNA
atgaagcaggctgatactacacag

SEQ ID NO: 1204 - RNA, 23 nt, synthetic construct
  misc_feature 1..23: note = Synthetic Primer, F701
  source 1..23: mol_type = other RNA
ttgtgaagatctgtgactttggc

SEQ ID NO: 1205 - RNA, 28 nt, synthetic construct
  misc_feature 1..28: note = Synthetic Primer, F702
  source 1..28: mol_type = other RNA
cctttgggttataaatagtgcactcaga

SEQ ID NO: 1206 - DNA, 27 bp, synthetic construct
  misc_feature 1..27: note = Synthetic DNA primer, F703
  modified_base 12: mod_base = OTHER; note = uracil
  modified_base 14..17: mod_base = OTHER; note = uracil
  modified_base 22: mod_base = OTHER; note = uracil
  modified_base 24: mod_base = OTHER; note = uracil
  modified_base 26: mod_base = OTHER; note = uracil
  source 1..27: mol_type = other DNA
gggaagaaaagtgttttgaaatgtgtt

SEQ ID NO: 1207 - RNA, 23 nt, synthetic construct
  misc_feature 1..23: note = Synthetic Primer, F704
  source 1..23: mol_type = other RNA
tggctttgaatctttggccagta

SEQ ID NO: 1208 - RNA, 21 nt, synthetic construct
  misc_feature 1..21: note = Synthetic Primer, F705
  source 1..21: mol_type = other RNA
gtcgaggcaatggaaaagctc

SEQ ID NO: 1209 - RNA, 25 nt, synthetic construct
  misc_feature 1..25: note = Synthetic Primer, F706
  source 1..25: mol_type = other RNA
agaacagctcaaagcaatttctaca

SEQ ID NO: 1210 - RNA, 26 nt, synthetic construct
  misc_feature 1..26: note = Synthetic Primer, F707
  source 1..26: mol_type = other RNA
agcaagaggctttggagtatttcatg

SEQ ID NO: 1211 - DNA, 29 bp, synthetic construct
  misc_feature 1..29: note = Synthetic DNA primer, F708
  modified_base 1: mod_base = OTHER; note = uracil
  modified_base 3..4: mod_base = OTHER; note = uracil
  modified_base 7: mod_base = OTHER; note = uracil
  modified_base 10: mod_base = OTHER; note = uracil
  modified_base 12: mod_base = OTHER; note = uracil
  modified_base 14: mod_base = OTHER; note = uracil
  modified_base 16: mod_base = OTHER; note = uracil
  modified_base 18: mod_base = OTHER; note = uracil
  modified_base 21: mod_base = OTHER; note = uracil
  modified_base 26: mod_base = OTHER; note = uracil
  modified_base 28: mod_base = OTHER; note = uracil
  source 1..29: mol_type = other DNA
tgttcatgctgtgtatgtaatagaatgtt

SEQ ID NO: 1212 - RNA, 28 nt, synthetic construct
  misc_feature 1..28: note = Synthetic Primer, F709
  source 1..28: mol_type = other RNA
ctggaatgccagaactacaatcttttga

SEQ ID NO: 1213 - DNA, 28 bp, synthetic construct
  misc_feature 1..28: note = Synthetic DNA primer, F710
  modified_base 2: mod_base = OTHER; note = uracil
  modified_base 24..27: mod_base = OTHER; note = uracil
  source 1..28: mol_type = other DNA
ctcaagaagcagaaagggaagaattttt

SEQ ID NO: 1214 - RNA, 24 nt, synthetic construct
  misc_feature 1..24: note = Synthetic Primer, F711
  source 1..24: mol_type = other RNA
tgacagccatcatcaaagagatcg

SEQ ID NO: 1215 - RNA, 24 nt, synthetic construct
  misc_feature 1..24: note = Synthetic Primer, F712
  source 1..24: mol_type = other RNA
gggatttcctgcagaaagacttga

SEQ ID NO: 1216 - RNA, 19 nt, synthetic construct
  misc_feature 1..19: note = Synthetic Primer, F713
  source 1..19: mol_type = other RNA
aaggcacaagaggccctag

SEQ ID NO: 1217 - DNA, 26 bp, synthetic construct
  misc_feature 1..26: note = Synthetic DNA primer, F714
  modified_base 6: mod_base = OTHER; note = uracil
  modified_base 10: mod_base = OTHER; note = uracil
  modified_base 14: mod_base = OTHER; note = uracil
  modified_base 20: mod_base = OTHER; note = uracil
  source 1..26: mol_type = other DNA
accaatggctaagtgaagatgacaat

SEQ ID NO: 1218 - RNA, 26 nt, synthetic construct
  misc_feature 1..26: note = Synthetic Primer, F715
  source 1..26: mol_type = other RNA
aggttatctttttaccacagttgcac

SEQ ID NO: 1219 - RNA, 25 nt, synthetic construct
  misc_feature 1..25: note = Synthetic Primer, F716
  source 1..25: mol_type = other RNA
ttttctgtccaccagggagtaacta

SEQ ID NO: 1220 - RNA, 26 nt, synthetic construct
  misc_feature 1..26: note = Synthetic Primer, F717
  source 1..26: mol_type = other RNA
gacaagttcatgtactttgagttccc

SEQ ID NO: 1221 - RNA, 24 nt, synthetic construct
  misc_feature 1..24: note = Synthetic Primer, F718
  source 1..24: mol_type = other RNA
agcaaataaagacaaagccaaccg

SEQ ID NO: 1222 - DNA, 30 bp, synthetic construct
  misc_feature 1..30: note = Synthetic DNA primer, F719
  modified_base 3..5: mod_base = OTHER; note = uracil
  modified_base 10: mod_base = OTHER; note = uracil
  modified_base 14: mod_base = OTHER; note = uracil
  modified_base 17: mod_base = OTHER; note = uracil
  modified_base 19..21: mod_base = OTHER; note = uracil
  modified_base 23: mod_base = OTHER; note = uracil
  modified_base 27..29: mod_base = OTHER; note = uracil
  source 1..30: mol_type = other DNA
agtttaagatgagtcatatttgtgggtttt

SEQ ID NO: 1223 - RNA, 24 nt, synthetic construct
  misc_feature 1..24: note = Synthetic Primer, F720
  source 1..24: mol_type = other RNA
ctgaccatgtggacattaggtgtg

SEQ ID NO: 1224 - RNA, 22 nt, synthetic construct
  misc_feature 1..22: note = Synthetic Primer, F721
  source 1..22: mol_type = other RNA
ccttccctcgggaaaaactgac

SEQ ID NO: 1225 - RNA, 26 nt, synthetic construct
  misc_feature 1..26: note = Synthetic Primer, F722
  source 1..26: mol_type = other RNA
gtttggttttgtaggtcttgtggatg

SEQ ID NO: 1226 - RNA, 21 nt, synthetic construct
  misc_feature 1..21: note = Synthetic Primer, F723
  source 1..21: mol_type = other RNA
gaggtggcctgatcttcacaa

SEQ ID NO: 1227 - DNA, 25 bp, synthetic construct
  misc_feature 1..25: note = Synthetic DNA primer, F724
  modified_base 4..5: mod_base = OTHER; note = uracil
  modified_base 7: mod_base = OTHER; note = uracil
  modified_base 11: mod_base = OTHER; note = uracil
  modified_base 14: mod_base = OTHER; note = uracil
  modified_base 20: mod_base = OTHER; note = uracil
  modified_base 24: mod_base = OTHER; note = uracil
  source 1..25: mol_type = other DNA
cgcttatgcatactcaggatgagtt

SEQ ID NO: 1228 - RNA, 23 nt, synthetic construct
  misc_feature 1..23: note = Synthetic Primer, F725
  source 1..23: mol_type = other RNA
taaggttccttcaagctgcccta

SEQ ID NO: 1229 - DNA, 25 bp, synthetic construct
  misc_feature 1..25: note = Synthetic DNA primer, F726
  modified_base 3: mod_base = OTHER; note = uracil
  modified_base 11: mod_base = OTHER; note = uracil
  modified_base 13..14: mod_base = OTHER; note = uracil
  modified_base 16..18: mod_base = OTHER; note = uracil
  modified_base 23..24: mod_base = OTHER; note = uracil
  source 1..25: mol_type = other DNA
catgggaggatgttctttcccattt

SEQ ID NO: 1230 - RNA, 25 nt, synthetic construct
  misc_feature 1..25: note = Synthetic Primer, F727
  source 1..25: mol_type = other RNA
ttttcttcctaaggttgcacatagg

SEQ ID NO: 1231 - DNA, 21 bp, synthetic construct
  misc_feature 1..21: note = Synthetic DNA primer, F728
  modified_base 2..6: mod_base = OTHER; note = uracil
  modified_base 10..11: mod_base = OTHER; note = uracil
  modified_base 14: mod_base = OTHER; note = uracil
  modified_base 19..20: mod_base = OTHER; note = uracil
  source 1..21: mol_type = other DNA
atttttggcttcctggccttt

SEQ ID NO: 1232 - RNA, 21 nt, synthetic construct
  misc_feature 1..21: note = Synthetic Primer, F729
  source 1..21: mol_type = other RNA
ggaaagcctcacctgtctacg

SEQ ID NO: 1233 - RNA, 18 nt, synthetic construct
  misc_feature 1..18: note = Synthetic Primer, F730
  source 1..18: mol_type = other RNA
tcaagaatcgcccgagcc

SEQ ID NO: 1234 - RNA, 20 nt, synthetic construct
  misc_feature 1..20: note = Synthetic Primer, F731
  source 1..20: mol_type = other RNA
ttggttcggacagacaaccc

SEQ ID NO: 1235 - RNA, 22 nt, synthetic construct
  misc_feature 1..22: note = Synthetic Primer, F732
  source 1..22: mol_type = other RNA
ctctgcacagctccaatgagac

SEQ ID NO: 1236 - DNA, 23 bp, synthetic construct
  misc_feature 1..23: note = Synthetic DNA primer, F733
  modified_base 3: mod_base = OTHER; note = uracil
  modified_base 12: mod_base = OTHER; note = uracil
  modified_base 18: mod_base = OTHER; note = uracil
  source 1..23: mol_type = other DNA
gctacaagaactaccgataccgt

SEQ ID NO: 1237 - RNA, 20 nt, synthetic construct
  misc_feature 1..20: note = Synthetic Primer, F734
  source 1..20: mol_type = other RNA
ctcggagaggagccatactg

SEQ ID NO: 1238 - RNA, 26 nt, synthetic construct
  misc_feature 1..26: note = Synthetic Primer, F735
  source 1..26: mol_type = other RNA
tataatgacagttaaccctgccagga

SEQ ID NO: 1239 - RNA, 22 nt, synthetic construct
  misc_feature 1..22: note = Synthetic Primer, F736
  source 1..22: mol_type = other RNA
aggaagagcacagtcactttga

SEQ ID NO: 1240 - RNA, 22 nt, synthetic construct
  misc_feature 1..22: note = Synthetic Primer, F737
  source 1..22: mol_type = other RNA
cagtggagcgaattcctttgga

SEQ ID NO: 1241 - RNA, 19 nt, synthetic construct
  misc_feature 1..19: note = Synthetic Primer, F738
  source 1..19: mol_type = other RNA
ttgggtcgttgggcattcc

SEQ ID NO: 1242 - RNA, 21 nt, synthetic construct
  misc_feature 1..21: note = Synthetic Primer, F739
  source 1..21: mol_type = other RNA
cagttcacagtgcagcgaaaa

SEQ ID NO: 1243 - RNA, 28 nt, synthetic construct
  misc_feature 1..28: note = Synthetic Primer, F740
  source 1..28: mol_type = other RNA
aaatatctacacacaggtctacaaggtc

SEQ ID NO: 1244 - RNA, 22 nt, synthetic construct
  misc_feature 1..22: note = Synthetic Primer, F741
  source 1..22: mol_type = other RNA
catccgggctttacgcaaataa

SEQ ID NO: 1245 - DNA, 25 bp, synthetic construct
  misc_feature 1..25: note = Synthetic DNA primer, F742
  modified_base 4: mod_base = OTHER; note = uracil
  modified_base 7..8: mod_base = OTHER; note = uracil
  modified_base 15..16: mod_base = OTHER; note = uracil
  modified_base 20: mod_base = OTHER; note = uracil
  modified_base 22..23: mod_base = OTHER; note = uracil
  source 1..25: mol_type = other DNA
gcctccttcaggaattcaatcttct

SEQ ID NO: 1246 - RNA, 19 nt, synthetic construct
  misc_feature 1..19: note = Synthetic Primer, F743
  source 1..19: mol_type = other RNA
atgagttctgggcactggg

SEQ ID NO: 1247 - DNA, 24 bp, synthetic construct
  misc_feature 1..24: note = Synthetic DNA primer, F744
  modified_base 3: mod_base = OTHER; note = uracil
  modified_base 10: mod_base = OTHER; note = uracil
  modified_base 12..13: mod_base = OTHER; note = uracil
  modified_base 21: mod_base = OTHER; note = uracil
  source 1..24: mol_type = other DNA
gatgcaaactcttgcacaaatgct

SEQ ID NO: 1248 - RNA, 21 nt, synthetic construct
  misc_feature 1..21: note = Synthetic Primer, F745
  source 1..21: mol_type = other RNA
gaaccccgagggcaaatacag

SEQ ID NO: 1249 - RNA, 24 nt, synthetic construct
  misc_feature 1..24: note = Synthetic Primer, F746
  source 1..24: mol_type = other RNA
cagttcgtgggcttgttttgtatc

SEQ ID NO: 1250 - RNA, 22 nt, synthetic construct
  misc_feature 1..22: note = Synthetic Primer, F747
  source 1..22: mol_type = other RNA
ttaaagctggctatggcacctg

SEQ ID NO: 1251 - RNA, 20 nt, synthetic construct
  misc_feature 1..20: note = Synthetic Primer, F748
  source 1..20: mol_type = other RNA
catctctcaccatcccaagg

SEQ ID NO: 1252 - RNA, 18 nt, synthetic construct
  misc_feature 1..18: note = Synthetic Primer, F749
  source 1..18: mol_type = other RNA
atacgcagcctgtaccca

SEQ ID NO: 1253 - RNA, 24 nt, synthetic construct
  misc_feature 1..24: note = Synthetic Primer, F750
  source 1..24: mol_type = other RNA
cacctctctcaagagtttggatgg

SEQ ID NO: 1254 - DNA, 20 bp, synthetic construct
  misc_feature 1..20: note = Synthetic DNA primer, F751
  modified_base 4..5: mod_base = OTHER; note = uracil
  modified_base 16: mod_base = OTHER; note = uracil
  source 1..20: mol_type = other DNA
agattgcgagagagctgcat

SEQ ID NO: 1255 - RNA, 22 nt, synthetic construct
  misc_feature 1..22: note = Synthetic Primer, F752
  source 1..22: mol_type = other RNA
ctgtgctgcatttcagagaacg

SEQ ID NO: 1256 - RNA, 19 nt, synthetic construct
  misc_feature 1..19: note = Synthetic Primer, F753
  source 1..19: mol_type = other RNA
aagacccaagctgcctgac

SEQ ID NO: 1257 - RNA, 24 nt, synthetic construct
  misc_feature 1..24: note = Synthetic Primer, F754
  source 1..24: mol_type = other RNA
gctatttttcctcacagctcgttc

SEQ ID NO: 1258 - RNA, 28 nt, synthetic construct
  misc_feature 1..28: note = Synthetic Primer, F755
  source 1..28: mol_type = other RNA
ctccttcctagagagttagagtaacttc

SEQ ID NO: 1259 - RNA, 26 nt, synthetic construct
  misc_feature 1..26: note = Synthetic Primer, F756
  source 1..26: mol_type = other RNA
gagcctgttttgtgtctactgttcta

SEQ ID NO: 1260 - DNA, 19 bp, synthetic construct
  misc_feature 1..19: note = Synthetic DNA primer, F757
  modified_base 2: mod_base = OTHER; note = uracil
  modified_base 4..5: mod_base = OTHER; note = uracil
  source 1..19: mol_type = other DNA
ctcttgcagcagccagact

SEQ ID NO: 1261 - RNA, 20 nt, synthetic construct
  misc_feature 1..20: note = Synthetic Primer, F758
  source 1..20: mol_type = other RNA
ccatgggactgactttctgc

SEQ ID NO: 1262 - DNA, 19 bp, synthetic construct
  misc_feature 1..19: note = Synthetic DNA primer, F759
  modified_base 3: mod_base = OTHER; note = uracil
  modified_base 11: mod_base = OTHER; note = uracil
  modified_base 14: mod_base = OTHER; note = uracil
  modified_base 17: mod_base = OTHER; note = uracil
  source 1..19: mol_type = other DNA
gctgaggacctggtcctct

SEQ ID NO: 1263 - RNA, 18 nt, synthetic construct
  misc_feature 1..18: note = Synthetic Primer, F760
  source 1..18: mol_type = other RNA
ctgcaccagcagctccta

SEQ ID NO: 1264 - DNA, 23 bp, synthetic construct
  misc_feature 1..23: note = Synthetic DNA primer, F761
  modified_base 10: mod_base = OTHER; note = uracil
  modified_base 12..13: mod_base = OTHER; note = uracil
  modified_base 20: mod_base = OTHER; note = uracil
  source 1..23: mol_type = other DNA
cccggacgatattgaacaatggt

SEQ ID NO: 1265 - RNA, 17 nt, synthetic construct
  misc_feature 1..17: note = Synthetic Primer, F762
  source 1..17: mol_type = other RNA
agcctcaccacgagctg

SEQ ID NO: 1266 - RNA, 23 nt, synthetic construct
  misc_feature 1..23: note = Synthetic Primer, F763
  source 1..23: mol_type = other RNA
cacctttccttgcctctttccta

SEQ ID NO: 1267 - DNA, 18 bp, synthetic construct
  misc_feature 1..18: note = Synthetic DNA primer, F764
  modified_base 2: mod_base = OTHER; note = uracil
  modified_base 9: mod_base = OTHER; note = uracil
  source 1..18: mol_type = other DNA
ctcaaggatgcccaggct

SEQ ID NO: 1268 - RNA, 21 nt, synthetic construct
  misc_feature 1..21: note = Synthetic Primer, F765
  source 1..21: mol_type = other RNA
cctccctgcttctgtctccta

SEQ ID NO: 1269 - RNA, 20 nt, synthetic construct
  misc_feature 1..20: note = Synthetic Primer, F766
  source 1..20: mol_type = other RNA
ccagttgcaaaccagacctc

SEQ ID NO: 1270 - RNA, 22 nt, synthetic construct
  misc_feature 1..22: note = Synthetic Primer, F767
  source 1..22: mol_type = other RNA
actccacacgcaaatttccttc

SEQ ID NO: 1271 - RNA, 17 nt, synthetic construct
  misc_feature 1..17: note = Synthetic Primer, F768
  source 1..17: mol_type = other RNA
agggtggcaagtggctc

SEQ ID NO: 1272 - RNA, 18 nt, synthetic construct
  misc_feature 1..18: note = Synthetic Primer, F769
  source 1..18: mol_type = other RNA
gaggctcccctttcttgc

SEQ ID NO: 1273 - RNA, 21 nt, synthetic construct
  misc_feature 1..21: note = Synthetic Primer, F770
  source 1..21: mol_type = other RNA
ctgtgactgcttgtagatggc

SEQ ID NO: 1274 - RNA, 18 nt, synthetic construct
  misc_feature 1..18: note = Synthetic Primer, F771
  source 1..18: mol_type = other RNA
ctgtcgtctctccagccc

SEQ ID NO: 1275 - RNA, 23 nt, synthetic construct
  misc_feature 1..23: note = Synthetic Primer, R498
  source 1..23: mol_type = other RNA
tgccatcattcttgaggaggaag

SEQ ID NO: 1276 - DNA, 19 bp, synthetic construct
  misc_feature 1..19: note = Synthetic DNA primer, R499
  modified_base 1: mod_base = OTHER; note = uracil
  modified_base 6: mod_base = OTHER; note = uracil
  modified_base 10: mod_base = OTHER; note = uracil
  modified_base 18: mod_base = OTHER; note = uracil
  source 1..19: mol_type = other DNA
tgcaatccctgccccggtt

SEQ ID NO: 1277 - DNA, 21 bp, synthetic construct
  misc_feature 1..21: note = Synthetic DNA primer, R500
  modified_base 4..5: mod_base = OTHER; note = uracil
  modified_base 12: mod_base = OTHER; note = uracil
  source 1..21: mol_type = other DNA
ggattgcaggctcaccccaat

SEQ ID NO: 1278 - RNA, 21 nt, synthetic construct
  misc_feature 1..21: note = Synthetic Primer, R501
  source 1..21: mol_type = other RNA
ctggatttcctcatggaagcc

SEQ ID NO: 1279 - RNA, 21 nt, synthetic construct
  misc_feature 1..21: note = Synthetic Primer, R502
  source 1..21: mol_type = other RNA
aaatccagttcgtcctgttca

SEQ ID NO: 1280 - RNA, 22 nt, synthetic construct
  misc_feature 1..22: note = Synthetic Primer, R503
  source 1..22: mol_type = other RNA
gaaactgcctcttgacctgtcc

SEQ ID NO: 1281 - DNA, 28 bp, synthetic construct
  misc_feature 1..28: note = Synthetic DNA primer, R504
  modified_base 8: mod_base = OTHER; note = uracil
  modified_base 11: mod_base = OTHER; note = uracil
  modified_base 13..14: mod_base = OTHER; note = uracil
  modified_base 20: mod_base = OTHER; note = uracil
  modified_base 22..23: mod_base = OTHER; note = uracil
  source 1..28: mol_type = other DNA
aggacagtcatgttgccagtattaaaat

SEQ ID NO: 1282 - RNA, 23 nt, synthetic construct
  misc_feature 1..23: note = Synthetic Primer, R505
  source 1..23: mol_type = other RNA
cttccatgactttggcaatctgg

SEQ ID NO: 1283 - DNA, 29 bp, synthetic construct
  misc_feature 1..29: note = Synthetic DNA primer, R506
  modified_base 6: mod_base = OTHER; note = uracil
  modified_base 8: mod_base = OTHER; note = uracil
  modified_base 11: mod_base = OTHER; note = uracil
  modified_base 13..15: mod_base = OTHER; note = uracil
  modified_base 19..22: mod_base = OTHER; note = uracil
  modified_base 28: mod_base = OTHER; note = uracil
  source 1..29: mol_type = other DNA
gaacatgtcctatttgaattttccgactt

SEQ ID NO: 1284 - DNA, 27 bp, synthetic construct
  misc_feature 1..27: note = Synthetic DNA primer, R507
  modified_base 12: mod_base = OTHER; note = uracil
  modified_base 16..17: mod_base = OTHER; note = uracil
  modified_base 21..24: mod_base = OTHER; note = uracil
  source 1..27: mol_type = other DNA
gacacaaagactggcttacattttgat

SEQ ID NO: 1285 - DNA, 22 bp, synthetic construct
  misc_feature 1..22: note = Synthetic DNA primer, R508
  modified_base 5: mod_base = OTHER; note = uracil
  modified_base 12..13: mod_base = OTHER; note = uracil
  modified_base 15: mod_base = OTHER; note = uracil
  modified_base 18: mod_base = OTHER; note = uracil
  modified_base 20: mod_base = OTHER; note = uracil
  source 1..22: mol_type = other DNA
aggctgaccacttctactctgt

SEQ ID NO: 1286 - RNA, 21 nt, synthetic construct
  misc_feature 1..21: note = Synthetic Primer, R509
  source 1..21: mol_type = other RNA
gcactcaggctggatgaacaa

SEQ ID NO: 1287 - RNA, 23 nt, synthetic construct
  misc_feature 1..23: note = Synthetic Primer, R510
  source 1..23: mol_type = other RNA
tgtccagggctatctggaagatc

SEQ ID NO: 1288 - RNA, 20 nt, synthetic construct
  misc_feature 1..20: note = Synthetic Primer, R511
  source 1..20: mol_type = other RNA
gcagcatttactgcagcttg

SEQ ID NO: 1289 - RNA, 27 nt, synthetic construct
  misc_feature 1..27: note = Synthetic Primer, R512
  source 1..27: mol_type = other RNA
tgacagaagtacatctgctaaacatga

SEQ ID NO: 1290 - RNA, 22 nt, synthetic construct
  misc_feature 1..22: note = Synthetic Primer, R513
  source 1..22: mol_type = other RNA
ctcacaggatcttcagctgacc

SEQ ID NO: 1291 - DNA, 22 bp, synthetic construct
  misc_feature 1..22: note = Synthetic DNA primer, R514
  modified_base 3..5: mod_base = OTHER; note = uracil
  modified_base 7..8: mod_base = OTHER; note = uracil
  modified_base 13: mod_base = OTHER; note = uracil
  source 1..22: mol_type = other DNA
actttgttggcatggcagaaat

SEQ ID NO: 1292 - DNA, 17 bp, synthetic construct
  misc_feature 1..17: note = Synthetic DNA primer, R515
  modified_base 5: mod_base = OTHER; note = uracil
  modified_base 8: mod_base = OTHER; note = uracil
  modified_base 11: mod_base = OTHER; note = uracil
  source 1..17: mol_type = other DNA
gccgtggtgctgaccat

SEQ ID NO: 1293 - RNA, 24 nt, synthetic construct
  misc_feature 1..24: note = Synthetic Primer, R516
  source 1..24: mol_type = other RNA
gtgatgattgggagattcctgatg

SEQ ID NO: 1294 - DNA, 29 bp, synthetic construct
  misc_feature 1..29: note = Synthetic DNA primer, R517
  modified_base 3: mod_base = OTHER; note = uracil
  modified_base 5: mod_base = OTHER; note = uracil
  modified_base 8: mod_base = OTHER; note = uracil
  modified_base 16: mod_base = OTHER; note = uracil
  modified_base 21: mod_base = OTHER; note = uracil
  modified_base 23: mod_base = OTHER; note = uracil
  modified_base 26: mod_base = OTHER; note = uracil
  modified_base 28: mod_base = OTHER; note = uracil
  source 1..29: mol_type = other DNA
gctctgataggaaaatgagatctactgtt

SEQ ID NO: 1295 - DNA, 18 bp, synthetic construct
  misc_feature 1..18: note = Synthetic DNA primer, R518
  modified_base 2: mod_base = OTHER; note = uracil
  modified_base 13..14: mod_base = OTHER; note = uracil
  source 1..18: mol_type = other DNA
ctccagcagggcttcgat

SEQ ID NO: 1296 - RNA, 25 nt, synthetic construct
  misc_feature 1..25: note = Synthetic Primer, R519
  source 1..25: mol_type = other RNA
ggactttgcaacttcaacaaaactc

SEQ ID NO: 1297 - RNA, 21 nt, synthetic construct
  misc_feature 1..21: note = Synthetic Primer, R520
  source 1..21: mol_type = other RNA
ctaggtgtctccccctgtaag

SEQ ID NO: 1298 - DNA, 18 bp, synthetic construct
  misc_feature 1..18: note = Synthetic DNA primer, R521
  modified_base 4..5: mod_base = OTHER; note = uracil
  modified_base 12..13: mod_base = OTHER; note = uracil
  source 1..18: mol_type = other DNA
aggttcaggccttgcact

SEQ ID NO: 1299 - DNA, 20 bp, synthetic construct
  misc_feature 1..20: note = Synthetic Primer, R522
  source 1..20: mol_type = other DNA
ccagcccaggaagcaaagag

SEQ ID NO: 1300 - RNA, 22 nt, synthetic construct
  misc_feature 1..22: note = Synthetic Primer, R523
  source 1..22: mol_type = other RNA
ttaaaactggtctcgctctccc

SEQ ID NO: 1301 - RNA, 20 nt, synthetic construct
  misc_feature 1..20: note = Synthetic Primer, R524
  source 1..20: mol_type = other RNA
gaaagcgggaatcgcagaaa

SEQ ID NO: 1302 - DNA, 22 bp, synthetic construct
  misc_feature 1..22: note = Synthetic DNA primer, R525
  modified_base 9: mod_base = OTHER; note = uracil
  modified_base 11..12: mod_base = OTHER; note = uracil
  modified_base 14..15: mod_base = OTHER; note = uracil
  modified_base 21: mod_base = OTHER; note = uracil
  source 1..22: mol_type = other DNA
ggaagacctcttcttcgcactt

SEQ ID NO: 1303 - RNA, 21 nt, synthetic construct
  misc_feature 1..21: note = Synthetic Primer, R526
  source 1..21: mol_type = other RNA
caaaagagctcccccatctcc

SEQ ID NO: 1304 - RNA, 25 nt, synthetic construct
  misc_feature 1..25: note = Synthetic Primer, R527
  source 1..25: mol_type = other RNA
agaagagacatctggacttagccaa

SEQ ID NO: 1305 - RNA, 21 nt, synthetic construct
  misc_feature 1..21: note = Synthetic Primer, R528
  source 1..21: mol_type = other RNA
atcatcgacggtgggtacatg

SEQ ID NO: 1306 - RNA, 20 nt, synthetic construct
  misc_feature 1..20: note = Synthetic Primer, R529
  source 1..20: mol_type = other RNA
cgttggtcctgacggtactg

SEQ ID NO: 1307 - RNA, 25 nt, synthetic construct
  misc_feature 1..25: note = Synthetic Primer, R530
  source 1..25: mol_type = other RNA
ccattctgaggactgctggtttata

SEQ ID NO: 1308 - RNA, 23 nt, synthetic construct
  misc_feature 1..23: note = Synthetic Primer, R531
  source 1..23: mol_type = other RNA
ccaggaccatcatcctactgtaa

SEQ ID NO: 1309 - RNA, 22 nt, synthetic construct
  misc_feature 1..22: note = Synthetic Primer, R532
  source 1..22: mol_type = other RNA
gagtgtttgctcctcactcttc

SEQ ID NO: 1310 - DNA, 25 bp, synthetic construct
  misc_feature 1..25: note = Synthetic DNA primer, R533
  modified_base 2..3: mod_base = OTHER; note = uracil
  modified_base 8..10: mod_base = OTHER; note = uracil
  modified_base 13..14: mod_base = OTHER; note = uracil
  modified_base 16: mod_base = OTHER; note = uracil
  modified_base 18: mod_base = OTHER; note = uracil
  modified_base 21: mod_base = OTHER; note = uracil
  modified_base 24: mod_base = OTHER; note = uracil
  source 1..25: mol_type = other DNA
cttcaggtttccttctctcatggtt

SEQ ID NO: 1311 - RNA, 20 nt, synthetic construct
  misc_feature 1..20: note = Synthetic Primer, R534
  source 1..20: mol_type = other RNA
ggatgagctcacagagctgc

SEQ ID NO: 1312 - DNA, 23 bp, synthetic construct
  misc_feature 1..23: note = Synthetic DNA primer, R535
  modified_base 1: mod_base = OTHER; note = uracil
  modified_base 11: mod_base = OTHER; note = uracil
  modified_base 21..22: mod_base = OTHER; note = uracil
  source 1..23: mol_type = other DNA
tcaaaaagcatgcccagaccttt

SEQ ID NO: 1313 - RNA, 23 nt, synthetic construct
  misc_feature 1..23: note = Synthetic Primer, R536
  source 1..23: mol_type = other RNA
actttgagacttctgctttgctc

SEQ ID NO: 1314 - RNA, 24 nt, synthetic construct
  misc_feature 1..24: note = Synthetic Primer, R537
  source 1..24: mol_type = other RNA
atcgaaaaactgtgcatctacacc

SEQ ID NO: 1315 - DNA, 18 bp, synthetic construct
  misc_feature 1..18: note = Synthetic DNA primer, R538
  modified_base 12: mod_base = OTHER; note = uracil
  modified_base 16: mod_base = OTHER; note = uracil
  source 1..18: mol_type = other DNA
agacccagcagtgactgt

SEQ ID NO: 1316 - DNA, 24 bp, synthetic construct
  misc_feature 1..24: note = Synthetic DNA primer, R539
  modified_base 6: mod_base = OTHER; note = uracil
  modified_base 8: mod_base = OTHER; note = uracil
  modified_base 11: mod_base = OTHER; note = uracil
  modified_base 21..22: mod_base = OTHER; note = uracil
  source 1..24: mol_type = other DNA
acaagtataatgagcaccccttct

SEQ ID NO: 1317 - RNA, 23 nt, synthetic construct
  misc_feature 1..23: note = Synthetic Primer, R540
  source 1..23: mol_type = other RNA
gtggacacacctgtattcctgag

SEQ ID NO: 1318 - RNA, 20 nt, synthetic construct
  misc_feature 1..20: note = Synthetic Primer, R541
  source 1..20: mol_type = other RNA
ccgaccagttgggcaaaatc

SEQ ID NO: 1319 - DNA, 25 bp, synthetic construct
  misc_feature 1..25: note = Synthetic DNA primer, R542
  modified_base 8: mod_base = OTHER; note = uracil
  modified_base 10: mod_base = OTHER; note = uracil
  modified_base 12..15: mod_base = OTHER; note = uracil
  modified_base 17..18: mod_base = OTHER; note = uracil
  modified_base 21: mod_base = OTHER; note = uracil
  modified_base 24: mod_base = OTHER; note = uracil
  source 1..25: mol_type = other DNA
gcagaagtctgttttcttcatggtt

SEQ ID NO: 1320 - RNA, 20 nt, synthetic construct
  misc_feature 1..20: note = Synthetic Primer, R543
  source 1..20: mol_type = other RNA
aggccatgttgggttaaagg

SEQ ID NO: 1321 - RNA, 24 nt, synthetic construct
  misc_feature 1..24: note = Synthetic Primer, R544
  source 1..24: mol_type = other RNA
agaatctacagctaccagatggca

SEQ ID NO: 1322 - RNA, 24 nt, synthetic construct
  misc_feature 1..24: note = Synthetic Primer, R545
  source 1..24: mol_type = other RNA
cctagtttccagtgcatctgtacc

SEQ ID NO: 1323 - RNA, 24 nt, synthetic construct
  misc_feature 1..24: note = Synthetic Primer, R546
  source 1..24: mol_type = other RNA
ggtccccatccattcttcctattc

SEQ ID NO: 1324 - RNA, 24 nt, synthetic construct
  misc_feature 1..24: note = Synthetic Primer, R547
  source 1..24: mol_type = other RNA
tgtggagtgttggctgtatctttg

SEQ ID NO: 1325 - RNA, 25 nt, synthetic construct
  misc_feature 1..25: note = Synthetic Primer, R548
  source 1..25: mol_type = other RNA
ctctgtaagcgacttttggtgatag

SEQ ID NO: 1326 - RNA, 25 nt, synthetic construct
  misc_feature 1..25: note = Synthetic Primer, R549
  source 1..25: mol_type = other RNA
gcccaaccaattgagaagtttgtaa

SEQ ID NO: 1327 - RNA, 24 nt, synthetic construct
  misc_feature 1..24: note = Synthetic Primer, R550
  source 1..24: mol_type = other RNA
ttagtcaggagtctaagccaacag

SEQ ID NO: 1328 - RNA, 23 nt, synthetic construct
  misc_feature 1..23: note = Synthetic Primer, R551
  source 1..23: mol_type = other RNA
cttgcccgcatctatagtttcca

SEQ ID NO: 1329 - DNA, 28 bp, synthetic construct
  misc_feature 1..28: note = Synthetic DNA primer, R552
  modified_base 4..5: mod_base = OTHER; note = uracil
  modified_base 9..12: mod_base = OTHER; note = uracil
  modified_base 16: mod_base = OTHER; note = uracil
  modified_base 18..20: mod_base = OTHER; note = uracil
  modified_base 23: mod_base = OTHER; note = uracil
  modified_base 26..27: mod_base = OTHER; note = uracil
  source 1..28: mol_type = other DNA
aacttccgttttgagtgtttactgattt

SEQ ID NO: 1330 - DNA, 25 bp, synthetic construct
  misc_feature 1..25: note = Synthetic DNA primer, R553
  modified_base 1..2: mod_base = OTHER; note = uracil
  modified_base 5..6: mod_base = OTHER; note = uracil
  modified_base 10: mod_base = OTHER; note = uracil
  modified_base 15..16: mod_base = OTHER; note = uracil
  source 1..25: mol_type = other DNA
ttacttggataaagttccagagcct

SEQ ID NO: 1331 - DNA, 25 bp, synthetic construct
  misc_feature 1..25: note = Synthetic DNA primer, R554
  modified_base 3..4: mod_base = OTHER; note = uracil
  modified_base 6..7: mod_base = OTHER; note = uracil
  modified_base 14: mod_base = OTHER; note = uracil
  modified_base 17..18: mod_base = OTHER; note = uracil
  modified_base 23: mod_base = OTHER; note = uracil
  source 1..25: mol_type = other DNA
gcttattgccacctacttaacctct

SEQ ID NO: 1332 - RNA, 19 nt, synthetic construct
  misc_feature 1..19: note = Synthetic Primer, R555
  source 1..19: mol_type = other RNA
cttcagccctgcagggaaa

SEQ ID NO: 1333 - RNA, 28 nt, synthetic construct
  misc_feature 1..28: note = Synthetic Primer, R556
  source 1..28: mol_type = other RNA
ggcaagttcaacattattcccttttgta

SEQ ID NO: 1334 - RNA, 23 nt, synthetic construct
  misc_feature 1..23: note = Synthetic Primer, R557
  source 1..23: mol_type = other RNA
tcttcctcaggattgcctttacc

SEQ ID NO: 1335 - RNA, 26 nt, synthetic construct
  misc_feature 1..26: note = Synthetic Primer, R558
  source 1..26: mol_type = other RNA
catacagagagggtcatcagtgatac

SEQ ID NO: 1336 - RNA, 23 nt, synthetic construct
  misc_feature 1..23: note = Synthetic Primer, R559
  source 1..23: mol_type = other RNA
gaaagtctcccacaaagtaaccc

SEQ ID NO: 1337 - RNA, 20 nt, synthetic construct
  misc_feature 1..20: note = Synthetic Primer, R560
  source 1..20: mol_type = other RNA
atagtcatagccgggccaca

SEQ ID NO: 1338 - RNA, 26 nt, synthetic construct
  misc_feature 1..26: note = Synthetic Primer, R561
  source 1..26: mol_type = other RNA
ccagtttattgtatttgcatagcaca

SEQ ID NO: 1339 - RNA, 26 nt, synthetic construct
  misc_feature 1..26: note = Synthetic Primer, R562
  source 1..26: mol_type = other RNA
ggacccattagaaccaactccataaa

SEQ ID NO: 1340 - RNA, 21 nt, synthetic construct
  misc_feature 1..21: note = Synthetic Primer, R563
  source 1..21: mol_type = other RNA
taccttatacaccgtgccgaa

SEQ ID NO: 1341 - RNA, 22 nt, synthetic construct
  misc_feature 1..22: note = Synthetic Primer, R564
  source 1..22: mol_type = other RNA
ccacacagcaaagcagaaactc

SEQ ID NO: 1342 - RNA, 20 nt, synthetic construct
  misc_feature 1..20: note = Synthetic Primer, R565
  source 1..20: mol_type = other RNA
ttctttctcttccgcaccca

SEQ ID NO: 1343 - RNA, 19 nt, synthetic construct
  misc_feature 1..19: note = Synthetic Primer, R566
  source 1..19: mol_type = other RNA
gtgaggcagatgcccagca

SEQ ID NO: 1344 - RNA, 27 nt, synthetic construct
  misc_feature 1..27: note = Synthetic Primer, R567
  source 1..27: mol_type = other RNA
ccaatattgtctttgtgttcccggaca

SEQ ID NO: 1345 - RNA, 20 nt, synthetic construct
  misc_feature 1..20: note = Synthetic Primer, R568
  source 1..20: mol_type = other RNA
tgtgttcctttggaggtggc

SEQ ID NO: 1346 - RNA, 24 nt, synthetic construct
  misc_feature 1..24: note = Synthetic Primer, R569
  source 1..24: mol_type = other RNA
gatccagaggaggagtatgtgtga

SEQ ID NO: 1347 - RNA, 24 nt, synthetic construct
  misc_feature 1..24: note = Synthetic Primer, R570
  source 1..24: mol_type = other RNA
tcttcctccatctcatagctgtcg

SEQ ID NO: 1348 - RNA, 20 nt, synthetic construct
  misc_feature 1..20: note = Synthetic Primer, R571
  source 1..20: mol_type = other RNA
cgtcctgttttcaggccaag

SEQ ID NO: 1349 - RNA, 24 nt, synthetic construct
  misc_feature 1..24: note = Synthetic Primer, R572
  source 1..24: mol_type = other RNA
attagagggactcttcccaatgga

SEQ ID NO: 1350 - RNA, 20 nt, synthetic construct
  misc_feature 1..20: note = Synthetic Primer, R573
  source 1..20: mol_type = other RNA
ccacggtggaattgttgctg

SEQ ID NO: 1351 - RNA, 27 nt, synthetic construct
  misc_feature 1..27: note = Synthetic Primer, R574
  source 1..27: mol_type = other RNA
ataccaggctagtatagatgcttaggg

SEQ ID NO: 1352 - RNA, 21 nt, synthetic construct
  misc_feature 1..21: note = Synthetic Primer, R575
  source 1..21: mol_type = other RNA
cagacaccaactcccggaatc

SEQ ID NO: 1353 - RNA, 20 nt, synthetic construct
  misc_feature 1..20: note = Synthetic Primer, R576
  source 1..20: mol_type = other RNA
cagaactctctccccagcag

SEQ ID NO: 1354 - RNA, 19 nt, synthetic construct
  misc_feature 1..19: note = Synthetic Primer, R577
  source 1..19: mol_type = other RNA
cagcttcatgtctgtgccg

SEQ ID NO: 1355 - RNA, 20 nt, synthetic construct
  misc_feature 1..20: note = Synthetic Primer, R578
  source 1..20: mol_type = other RNA
tcacaccgctgtgttccatc

SEQ ID NO: 1356 - RNA, 21 nt, synthetic construct
  misc_feature 1..21: note = Synthetic Primer, R579
  source 1..21: mol_type = other RNA
gttgtgagcgatgagcacgta

SEQ ID NO: 1357 - RNA, 23 nt, synthetic construct
  misc_feature 1..23: note = Synthetic Primer, R580
  source 1..23: mol_type = other RNA
aaaatcgtgtcctggtagcagag

SEQ ID NO: 1358 - DNA, 25 bp, synthetic construct
  misc_feature 1..25: note = Synthetic DNA primer, R581
  modified_base 11: mod_base = OTHER; note = uracil
  modified_base 20: mod_base = OTHER; note = uracil
  modified_base 22: mod_base = OTHER; note = uracil
  modified_base 24: mod_base = OTHER; note = uracil
  source 1..25: mol_type = other DNA
cccaccaaaatgagaaaactgtgtt

SEQ ID NO: 1359 - RNA, 20 nt, synthetic construct
  misc_feature 1..20: note = Synthetic Primer, R582
  source 1..20: mol_type = other RNA
tgtcctcctagcaggagagg

SEQ ID NO: 1360 - RNA, 20 nt, synthetic construct
  misc_feature 1..20: note = Synthetic Primer, R583
  source 1..20: mol_type = other RNA
ccgtggatgtcaggcagatg

SEQ ID NO: 1361 - RNA, 24 nt, synthetic construct
  misc_feature 1..24: note = Synthetic Primer, R584
  source 1..24: mol_type = other RNA
atactggactcatctctccttccc

SEQ ID NO: 1362 - DNA, 19 bp, synthetic construct
  misc_feature 1..19: note = Synthetic Primer, R585
  source 1..19: mol_type = other DNA
aaagaccacccccaagacc

SEQ ID NO: 1363 - DNA, 23 bp, synthetic construct
  misc_feature 1..23: note = Synthetic DNA primer, R586
  modified_base 2: mod_base = OTHER; note = uracil
  modified_base 6: mod_base = OTHER; note = uracil
  modified_base 14: mod_base = OTHER; note = uracil
  modified_base 18: mod_base = OTHER; note = uracil
  modified_base 20: mod_base = OTHER; note = uracil
  source 1..23: mol_type = other DNA
ataactccacacatcactctggt

SEQ ID NO: 1364 - RNA, 23 nt, synthetic construct
  misc_feature 1..23: note = Synthetic Primer, R587
  source 1..23: mol_type = other RNA
ttgacatggttgggactcttgac

SEQ ID NO: 1365 - RNA, 22 nt, synthetic construct
  misc_feature 1..22: note = Synthetic Primer, R588
  source 1..22: mol_type = other RNA
tggcaaacttcccatcgtagac

SEQ ID NO: 1366 - RNA, 24 nt, synthetic construct
  misc_feature 1..24: note = Synthetic Primer, R589
  source 1..24: mol_type = other RNA
gttgatcattgttccttcccctca

SEQ ID NO: 1367 - RNA, 21 nt, synthetic construct
  misc_feature 1..21: note = Synthetic Primer, R590
  source 1..21: mol_type = other RNA
ccatcttgtcaggaggacagg

SEQ ID NO: 1368 - RNA, 23 nt, synthetic construct
  misc_feature 1..23: note = Synthetic Primer, R591
  source 1..23: mol_type = other RNA
ggcaggatctctaacccattgag

SEQ ID NO: 1369 - RNA, 22 nt, synthetic construct
  misc_feature 1..22: note = Synthetic Primer, R592
  source 1..22: mol_type = other RNA
ctcagcaggtaactcacacttg

SEQ ID NO: 1370 - DNA, 18 bp, synthetic construct
  misc_feature 1..18: note = Synthetic DNA primer, R593
  modified_base 2..3: mod_base = OTHER; note = uracil
  modified_base 7: mod_base = OTHER; note = uracil
  modified_base 11: mod_base = OTHER; note = uracil
  modified_base 14: mod_base = OTHER; note = uracil
  source 1..18: mol_type = other DNA
cttccctgggtgctccat

SEQ ID NO: 1371 - RNA, 22 nt, synthetic construct
  misc_feature 1..22: note = Synthetic Primer, R594
  source 1..22: mol_type = other RNA
gtggatatggtccttctcttcc

SEQ ID NO: 1372 - RNA, 19 nt, synthetic construct
  misc_feature 1..19: note = Synthetic Primer, R595
  source 1..19: mol_type = other RNA
ggctagtgggcgcatgtag

SEQ ID NO: 1373 - RNA, 20 nt, synthetic construct
  misc_feature 1..20: note = Synthetic Primer, R596
  source 1..20: mol_type = other RNA
atcaaagtccagcaccagca

SEQ ID NO: 1374 - RNA, 24 nt, synthetic construct
  misc_feature 1..24: note = Synthetic Primer, R597
  source 1..24: mol_type = other RNA
gggaattgcattcacacgttaaca

SEQ ID NO: 1375 - RNA, 29 nt, synthetic construct
  misc_feature 1..29: note = Synthetic Primer, R598
  source 1..29: mol_type = other RNA
tttgttttgtttttctgtttctccctctg

SEQ ID NO: 1376 - RNA, 24 nt, synthetic construct
  misc_feature 1..24: note = Synthetic Primer, R599
  source 1..24: mol_type = other RNA
gagggttgttagtggagcatatga

SEQ ID NO: 1377 - RNA, 23 nt, synthetic construct
  misc_feature 1..23: note = Synthetic Primer, R600
  source 1..23: mol_type = other RNA
tgagacaggccagtgtttacatg

SEQ ID NO: 1378 - DNA, 26 bp, synthetic construct
  misc_feature 1..26: note = Synthetic DNA primer, R601
  modified_base 6: mod_base = OTHER; note = uracil
  modified_base 13: mod_base = OTHER; note = uracil
  modified_base 15: mod_base = OTHER; note = uracil
  modified_base 17: mod_base = OTHER; note = uracil
  modified_base 25: mod_base = OTHER; note = uracil
  source 1..26: mol_type = other DNA
gagactggagaatgtatacacacctt

SEQ ID NO: 1379 - DNA, 18 bp, synthetic construct
  misc_feature 1..18: note = Synthetic DNA primer, R602
  modified_base 6: mod_base = OTHER; note = uracil
  modified_base 8: mod_base = OTHER; note = uracil
  modified_base 11: mod_base = OTHER; note = uracil
  modified_base 17: mod_base = OTHER; note = uracil
  source 1..18: mol_type = other DNA
cgacatctcctcgggctt

SEQ ID NO: 1380 - RNA, 18 nt, synthetic construct
  misc_feature 1..18: note = Synthetic Primer, R603
  source 1..18: mol_type = other RNA
cgtagagctccgggtgtc

SEQ ID NO: 1381 - DNA, 20 bp, synthetic construct
  misc_feature 1..20: note = Synthetic DNA primer, R604
  modified_base 2: mod_base = OTHER; note = uracil
  modified_base 15: mod_base = OTHER; note = uracil
  modified_base 17..19: mod_base = OTHER; note = uracil
  source 1..20: mol_type = other DNA
ctacccagggccactgtttt

SEQ ID NO: 1382 - RNA, 22 nt, synthetic construct
  misc_feature 1..22: note = Synthetic Primer, R605
  source 1..22: mol_type = other RNA
gggacattcaccacatcgacta

SEQ ID NO: 1383 - RNA, 18 nt, synthetic construct
  misc_feature 1..18: note = Synthetic Primer, R606
  source 1..18: mol_type = other RNA
tggcctcttctcctgtgc

SEQ ID NO: 1384 - RNA, 25 nt, synthetic construct
  misc_feature 1..25: note = Synthetic Primer, R607
  source 1..25: mol_type = other RNA
cttcttcttcccatagatgctctcc

SEQ ID NO: 1385 - RNA, 24 nt, synthetic construct
  misc_feature 1..24: note = Synthetic Primer, R608
  source 1..24: mol_type = other RNA
gaggcattatttgaccggatctac

SEQ ID NO: 1386 - RNA, 23 nt, synthetic construct
  misc_feature 1..23: note = Synthetic Primer, R609
  source 1..23: mol_type = other RNA
ctgagtatgagcttcccgaagac

SEQ ID NO: 1387 - RNA, 19 nt, synthetic construct
  misc_feature 1..19: note = Synthetic Primer, R610
  source 1..19: mol_type = other RNA
cctgctaacaccctgttcg

SEQ ID NO: 1388 - DNA, 21 bp, synthetic construct
  misc_feature 1..21: note = Synthetic DNA primer, R611
  modified_base 2: mod_base = OTHER; note = uracil
  modified_base 6: mod_base = OTHER; note = uracil
  modified_base 8: mod_base = OTHER; note = uracil
  modified_base 10: mod_base = OTHER; note = uracil
  modified_base 12: mod_base = OTHER; note = uracil
  modified_base 14..15: mod_base = OTHER; note = uracil
  modified_base 19..20: mod_base = OTHER; note = uracil
  source 1..21: mol_type = other DNA
ctgcctgtctctcttggcttt

SEQ ID NO: 1389 - RNA, 26 nt, synthetic construct
  misc_feature 1..26: note = Synthetic Primer, R612
  source 1..26: mol_type = other RNA
tatgaacttccagaggacccaaaatg

SEQ ID NO: 1390 - RNA, 24 nt, synthetic construct
  misc_feature 1..24: note = Synthetic Primer, R613
  source 1..24: mol_type = other RNA
ggaaaagaacggcagtaaatacgg

SEQ ID NO: 1391 - RNA, 23 nt, synthetic construct
  misc_feature 1..23: note = Synthetic Primer, R614
  source 1..23: mol_type = other RNA
aatacgggtccatcaatcacacg

SEQ ID NO: 1392 - RNA, 25 nt, synthetic construct
  misc_feature 1..25: note = Synthetic Primer, R615
  source 1..25: mol_type = other RNA
cagtacttggtattctgtgctagga

SEQ ID NO: 1393 - RNA, 25 nt, synthetic construct
  misc_feature 1..25: note = Synthetic Primer, R616
  source 1..25: mol_type = other RNA
ggaagctgtccatcagtatacattc

SEQ ID NO: 1394 - RNA, 23 nt, synthetic construct
  misc_feature 1..23: note = Synthetic Primer, R617
  source 1..23: mol_type = other RNA
ggccctccttcagtttagttgag

SEQ ID NO: 1395 - RNA, 21 nt, synthetic construct
  misc_feature 1..21: note = Synthetic Primer, R618
  source 1..21: mol_type = other RNA
ggtggaggcgatagtggatag

SEQ ID NO: 1396 - RNA, 26 nt, synthetic construct
  misc_feature 1..26: note = Synthetic Primer, R619
  source 1..26: mol_type = other RNA
agatggagatgatgaagatgattggg

SEQ ID NO: 1397 - RNA, 22 nt, synthetic construct
  misc_feature 1..22: note = Synthetic Primer, R620
  source 1..22: mol_type = other RNA
gtcaagtggatggctccagaag

SEQ ID NO: 1398 - RNA, 28 nt, synthetic construct
  misc_feature 1..28: note = Synthetic Primer, R621
  source 1..28: mol_type = other RNA
ccagaaatgttttggtaacagaaaacaa

SEQ ID NO: 1399 - RNA, 26 nt, synthetic construct
  misc_feature 1..26: note = Synthetic Primer, R622
  source 1..26: mol_type = other RNA
attctctctttagggagcttctcttc

SEQ ID NO: 1400 - RNA, 27 nt, synthetic construct
  misc_feature 1..27: note = Synthetic Primer, R623
  source 1..27: mol_type = other RNA
tggaagagaaaaggagattacagcttc

SEQ ID NO: 1401 - RNA, 23 nt, synthetic construct
  misc_feature 1..23: note = Synthetic Primer, R624
  source 1..23: mol_type = other RNA
attggtctctcattctcccatcc

SEQ ID NO: 1402 - DNA, 23 bp, synthetic construct
  misc_feature 1..23: note = Synthetic DNA primer, R625
  modified_base 2..4: mod_base = OTHER; note = uracil
  modified_base 8..11: mod_base = OTHER; note = uracil
  modified_base 19: mod_base = OTHER; note = uracil
  source 1..23: mol_type = other DNA
gtttaggttttggcaacgtggat

SEQ ID NO: 1403 - RNA, 24 nt, synthetic construct
  misc_feature 1..24: note = Synthetic Primer, R626
  source 1..24: mol_type = other RNA
tcaccagatgctatgtgctaatcc

SEQ ID NO: 1404 - RNA, 19 nt, synthetic construct
  misc_feature 1..19: note = Synthetic Primer, R627
  source 1..19: mol_type = other RNA
tcctacctgtgtccacacc

SEQ ID NO: 1405 - DNA, 19 bp, synthetic construct
  misc_feature 1..19: note = Synthetic DNA primer, R628
  modified_base 5: mod_base = OTHER; note = uracil
  modified_base 15: mod_base = OTHER; note = uracil
  modified_base 18: mod_base = OTHER; note = uracil
  source 1..19: mol_type = other DNA
ggcatgggacagagtcgtt

SEQ ID NO: 1406 - RNA, 22 nt, synthetic construct
  misc_feature 1..22: note = Synthetic Primer, R629
  source 1..22: mol_type = other RNA
ttgtgcaaggagagaacctcta

SEQ ID NO: 1407 - RNA, 25 nt, synthetic construct
  misc_feature 1..25: note = Synthetic Primer, R630
  source 1..25: mol_type = other RNA
cctatcccagaactggagacagaaa

SEQ ID NO: 1408 - DNA, 21 bp, synthetic construct
  misc_feature 1..21: note = Synthetic DNA primer, R631
  modified_base 1: mod_base = OTHER; note = uracil
  modified_base 3: mod_base = OTHER; note = uracil
  modified_base 9..10: mod_base = OTHER; note = uracil
  modified_base 15: mod_base = OTHER; note = uracil
  source 1..21: mol_type = other DNA
tgtacaccttgcagtggaact

SEQ ID NO: 1409 - RNA, 18 nt, synthetic construct
  misc_feature 1..18: note = Synthetic Primer, R632
  source 1..18: mol_type = other RNA
agcccaggcctttcttgg

SEQ ID NO: 1410 - RNA, 17 nt, synthetic construct
  misc_feature 1..17: note = Synthetic Primer, R633
  source 1..17: mol_type = other RNA
actggcatgacccccac

SEQ ID NO: 1411 - DNA, 17 bp, synthetic construct
  misc_feature 1..17: note = Synthetic DNA primer, R634
  modified_base 1: mod_base = OTHER; note = uracil
  modified_base 7: mod_base = OTHER; note = uracil
  modified_base 14: mod_base = OTHER; note = uracil
  source 1..17: mol_type = other DNA
tgccactcacaggtcgt

SEQ ID NO: 1412 - DNA, 18 bp, synthetic construct
  misc_feature 1..18: note = Synthetic DNA primer, R635
  modified_base 9: mod_base = OTHER; note = uracil
  source 1..18: mol_type = other DNA
gcagaaactcccgcaggt

SEQ ID NO: 1413 - DNA, 20 bp, synthetic construct
  misc_feature 1..20: note = Synthetic DNA primer, R636
  modified_base 3: mod_base = OTHER; note = uracil
  modified_base 9: mod_base = OTHER; note = uracil
  modified_base 12: mod_base = OTHER; note = uracil
  modified_base 16: mod_base = OTHER; note = uracil
  source 1..20: mol_type = other DNA
actccagatactgcatgcct

SEQ ID NO: 1414 - RNA, 17 nt, synthetic construct
  misc_feature 1..17: note = Synthetic Primer, R637
  source 1..17: mol_type = other RNA
actcccgcaggtttccc

SEQ ID NO: 1415 - RNA, 24 nt, synthetic construct
  misc_feature 1..24: note = Synthetic Primer, R638
  source 1..24: mol_type = other RNA
acgggaaagtggtgaagatatgtg

SEQ ID NO: 1416 - RNA, 26 nt, synthetic construct
  misc_feature 1..26: note = Synthetic Primer, R639
  source 1..26: mol_type = other RNA
agaaacatgatggatgtcacgttctc

SEQ ID NO: 1417 - DNA, 24 bp, synthetic construct
  misc_feature 1..24: note = Synthetic DNA primer, R640
  modified_base 1: mod_base = OTHER; note = uracil
  modified_base 3..4: mod_base = OTHER; note = uracil
  modified_base 9..10: mod_base = OTHER; note = uracil
  modified_base 17: mod_base = OTHER; note = uracil
  modified_base 20: mod_base = OTHER; note = uracil
  source 1..24: mol_type = other DNA
tgttaaccttgcagaatggtcgat

SEQ ID NO: 1418 - RNA, 19 nt, synthetic construct
  misc_feature 1..19: note = Synthetic Primer, R641
  source 1..19: mol_type = other RNA
atgacttggaccgcgtagc

SEQ ID NO: 1419 - DNA, 21 bp, synthetic construct
  misc_feature 1..21: note = Synthetic DNA primer, R642
  modified_base 4: mod_base = OTHER; note = uracil
  modified_base 7: mod_base = OTHER; note = uracil
  modified_base 12..13: mod_base = OTHER; note = uracil
  source 1..21: mol_type = other DNA
gcatcctaccgttgaagcact

SEQ ID NO: 1420 - DNA, 25 bp, synthetic construct
  misc_feature 1..25: note = Synthetic DNA primer, R643
  modified_base 5: mod_base = OTHER; note = uracil
  modified_base 11..12: mod_base = OTHER; note = uracil
  modified_base 15: mod_base = OTHER; note = uracil
  modified_base 17: mod_base = OTHER; note = uracil
  modified_base 24: mod_base = OTHER; note = uracil
  source 1..25: mol_type = other DNA
cacctggaacttggtctcaaagatt

SEQ ID NO: 1421 - DNA, 19 bp, synthetic construct
  misc_feature 1..19: note = Synthetic DNA primer, R644
  modified_base 2..3: mod_base = OTHER; note = uracil
  modified_base 6: mod_base = OTHER; note = uracil
  source 1..19: mol_type = other DNA
attcctaccggaagcaggt

SEQ ID NO: 1422 - DNA, 23 bp, synthetic construct
  misc_feature 1..23: note = Synthetic DNA primer, R645
  modified_base 2: mod_base = OTHER; note = uracil
  modified_base 10: mod_base = OTHER; note = uracil
  modified_base 12: mod_base = OTHER; note = uracil
  modified_base 17: mod_base = OTHER; note = uracil
  modified_base 20: mod_base = OTHER; note = uracil
  source 1..23: mol_type = other DNA
atgacggaatataagctggtggt

SEQ ID NO: 1423 - RNA, 22 nt, synthetic construct
  misc_feature 1..22: note = Synthetic Primer, R646
  source 1..22: mol_type = other RNA
aaaatatcccccggcttgtgag

SEQ ID NO: 1424 - RNA, 26 nt, synthetic construct
  misc_feature 1..26: note = Synthetic Primer, R647
  source 1..26: mol_type = other RNA
gaagaagatgtggaaaagtcccaatg

SEQ ID NO: 1425 - RNA, 17 nt, synthetic construct
  misc_feature 1..17: note = Synthetic Primer, R648
  source 1..17: mol_type = other RNA
gtccctggctggaccaa

SEQ ID NO: 1426 - RNA, 22 nt, synthetic construct
  misc_feature 1..22: note = Synthetic Primer, R649
  source 1..22: mol_type = other RNA
cacacattggagcatgccattc

SEQ ID NO: 1427 - DNA, 27 bp, synthetic construct
  misc_feature 1..27: note = Synthetic DNA primer, R650
  modified_base 5: mod_base = OTHER; note = uracil
  modified_base 11: mod_base = OTHER; note = uracil
  modified_base 16..17: mod_base = OTHER; note = uracil
  modified_base 21..22: mod_base = OTHER; note = uracil
  modified_base 26: mod_base = OTHER; note = uracil
  source 1..27: mol_type = other DNA
agcctaaacatccccttaaattggatt

SEQ ID NO: 1428 - RNA, 20 nt, synthetic construct
  misc_feature 1..20: note = Synthetic Primer, R651
  source 1..20: mol_type = other RNA
cggctttacctccaatggtg

SEQ ID NO: 1429 - RNA, 24 nt, synthetic construct
  misc_feature 1..24: note = Synthetic Primer, R652
  source 1..24: mol_type = other RNA
gcagagaatgggtactcacgtttc

SEQ ID NO: 1430 - DNA, 21 bp, synthetic construct
  misc_feature 1..21: note = Synthetic DNA primer, R653
  modified_base 1: mod_base = OTHER; note = uracil
  modified_base 7: mod_base = OTHER; note = uracil
  modified_base 9..11: mod_base = OTHER; note = uracil
  modified_base 13: mod_base = OTHER; note = uracil
  source 1..21: mol_type = other DNA
tcagcctgtttctgggaaact

SEQ ID NO: 1431 - RNA, 29 nt, synthetic construct
  misc_feature 1..29: note = Synthetic Primer, R654
  source 1..29: mol_type = other RNA
tggagagagaacaaataaatggttacctg

SEQ ID NO: 1432 - DNA, 27 bp, synthetic construct
  misc_feature 1..27: note = Synthetic DNA primer, R655
  modified_base 3..4: mod_base = OTHER; note = uracil
  modified_base 6..7: mod_base = OTHER; note = uracil
  modified_base 9: mod_base = OTHER; note = uracil
  modified_base 14: mod_base = OTHER; note = uracil
  modified_base 20..21: mod_base = OTHER; note = uracil
  modified_base 23: mod_base = OTHER; note = uracil
  source 1..27: mol_type = other DNA
gattcttataaagtgcagcttctgcat

SEQ ID NO: 1433 - DNA, 24 bp, synthetic construct
  misc_feature 1..24: note = Synthetic DNA primer, R656
  modified_base 7: mod_base = OTHER; note = uracil
  modified_base 11..13: mod_base = OTHER; note = uracil
  modified_base 20: mod_base = OTHER; note = uracil
  modified_base 22: mod_base = OTHER; note = uracil
  source 1..24: mol_type = other DNA
cagacgtcactttcaaacgtgtat

SEQ ID NO: 1434 - RNA, 22 nt, synthetic construct
  misc_feature 1..22: note = Synthetic Primer, R657
  source 1..22: mol_type = other RNA
caggctcaggacttagcaagaa

SEQ ID NO: 1435 - RNA, 24 nt, synthetic construct
  misc_feature 1..24: note = Synthetic Primer, R658
  source 1..24: mol_type = other RNA
taaggcctgctgaaaatgactgaa

SEQ ID NO: 1436 - DNA, 21 bp, synthetic construct
  misc_feature 1..21: note = Synthetic DNA primer, R659
  modified_base 3: mod_base = OTHER; note = uracil
  modified_base 6: mod_base = OTHER; note = uracil
  modified_base 9: mod_base = OTHER; note = uracil
  modified_base 11: mod_base = OTHER; note = uracil
  modified_base 14: mod_base = OTHER; note = uracil
  modified_base 17: mod_base = OTHER; note = uracil
  source 1..21: mol_type = other DNA
agtcctcatgtactggtccct

SEQ ID NO: 1437 - RNA, 20 nt, synthetic construct
  misc_feature 1..20: note = Synthetic Primer, R660
  source 1..20: mol_type = other RNA
ctgatctcgccatcgctgta

SEQ ID NO: 1438 - DNA, 24 bp, synthetic construct
  misc_feature 1..24: note = Synthetic DNA primer, R661
  modified_base 2..3: mod_base = OTHER; note = uracil
  modified_base 6: mod_base = OTHER; note = uracil
  modified_base 14: mod_base = OTHER; note = uracil
  modified_base 16: mod_base = OTHER; note = uracil
  modified_base 23: mod_base = OTHER; note = uracil
  source 1..24: mol_type = other DNA
gttcataccgacatgtaggacctt

SEQ ID NO: 1439 - RNA, 23 nt, synthetic construct
  misc_feature 1..23: note = Synthetic Primer, R662
  source 1..23: mol_type = other RNA
tcaaagtcgtcatccttcagttc

SEQ ID NO: 1440 - DNA, 19 bp, synthetic construct
  misc_feature 1..19: note = Synthetic DNA primer, R663
  modified_base 3: mod_base = OTHER; note = uracil
  modified_base 9: mod_base = OTHER; note = uracil
  modified_base 11: mod_base = OTHER; note = uracil
  source 1..19: mol_type = other DNA
cctccagatgtgaagccct

SEQ ID NO: 1441 - DNA, 19 bp, synthetic construct
  misc_feature 1..19: note = Synthetic DNA primer, R664
  modified_base 3: mod_base = OTHER; note = uracil
  modified_base 12: mod_base = OTHER; note = uracil
  modified_base 18: mod_base = OTHER; note = uracil
  source 1..19: mol_type = other DNA
gctggaggagctggaactt

SEQ ID NO: 1442 - RNA, 21 nt, synthetic construct
  misc_feature 1..21: note = Synthetic Primer, R665
  source 1..21: mol_type = other RNA
taaacaggagcacgaggatgc

SEQ ID NO: 1443 - DNA, 19 bp, synthetic construct
  misc_feature 1..19: note = Synthetic DNA primer, R666
  modified_base 1: mod_base = OTHER; note = uracil
  modified_base 3..4: mod_base = OTHER; note = uracil
  modified_base 7: mod_base = OTHER; note = uracil
  modified_base 18: mod_base = OTHER; note = uracil
  source 1..19: mol_type = other DNA
tattcatcacggcgcgctt

SEQ ID NO: 1444 - RNA, 26 nt, synthetic construct
  misc_feature 1..26: note = Synthetic Primer, R667
  source 1..26: mol_type = other RNA
gagtccaggagaaaattcacatgagg

SEQ ID NO: 1445 - DNA, 30 bp, synthetic construct
  misc_feature 1..30: note = Synthetic DNA primer, R668
  modified_base 10: mod_base = OTHER; note = uracil
  modified_base 15: mod_base = OTHER; note = uracil
  modified_base 17: mod_base = OTHER; note = uracil
  modified_base 19: mod_base = OTHER; note = uracil
  modified_base 21: mod_base = OTHER; note = uracil
  modified_base 23: mod_base = OTHER; note = uracil
  modified_base 27: mod_base = OTHER; note = uracil
  modified_base 29: mod_base = OTHER; note = uracil
  source 1..30: mol_type = other DNA
acaacccactgaggtatatgtataggtatt

SEQ ID NO: 1446 - RNA, 24 nt, synthetic construct
  misc_feature 1..24: note = Synthetic Primer, R669
  source 1..24: mol_type = other RNA
agcacagtgaattttcttgccatc

SEQ ID NO: 1447 - RNA, 25 nt, synthetic construct
  misc_feature 1..25: note = Synthetic Primer, R670
  source 1..25: mol_type = other RNA
ggtggtaaacttttgagtttgcaga

SEQ ID NO: 1448 - DNA, 22 bp, synthetic construct
  misc_feature 1..22: note = Synthetic DNA primer, R671
  modified_base 10: mod_base = OTHER; note = uracil
  modified_base 13: mod_base = OTHER; note = uracil
  source 1..22: mol_type = other DNA
gggaaggagtggtacaacagat

SEQ ID NO: 1449 - RNA, 25 nt, synthetic construct
  misc_feature 1..25: note = Synthetic Primer, R672
  source 1..25: mol_type = other RNA
acagctagtttgccagttagtaagc

SEQ ID NO: 1450 - RNA, 25 nt, synthetic construct
  misc_feature 1..25: note = Synthetic Primer, R673
  source 1..25: mol_type = other RNA
cacttaatttggattgtggcacaga

SEQ ID NO: 1451 - RNA, 21 nt, synthetic construct
  misc_feature 1..21: note = Synthetic Primer, R674
  source 1..21: mol_type = other RNA
ctcttgtcatcagctcccaga

SEQ ID NO: 1452 - RNA, 20 nt, synthetic construct
  misc_feature 1..20: note = Synthetic Primer, R675
  source 1..20: mol_type = other RNA
gcgccagcatccagagatac

SEQ ID NO: 1453 - DNA, 20 bp, synthetic construct
  misc_feature 1..20: note = Synthetic DNA primer, R676
  modified_base 6: mod_base = OTHER; note = uracil
  modified_base 8: mod_base = OTHER; note = uracil
  modified_base 11: mod_base = OTHER; note = uracil
  modified_base 17: mod_base = OTHER; note = uracil
  modified_base 19: mod_base = OTHER; note = uracil
  source 1..20: mol_type = other DNA
gagcgtgtgatgcagctctt

SEQ ID NO: 1454 - RNA, 26 nt, synthetic construct
  misc_feature 1..26: note = Synthetic Primer, R677
  source 1..26: mol_type = other RNA
gtttgaccgaagaaccaattataccc

SEQ ID NO: 1455 - RNA, 25 nt, synthetic construct
  misc_feature 1..25: note = Synthetic Primer, R678
  source 1..25: mol_type = other RNA
gatgcttctctccttcttctcttgg

SEQ ID NO: 1456 - RNA, 26 nt, synthetic construct
  misc_feature 1..26: note = Synthetic Primer, R679
  source 1..26: mol_type = other RNA
ttccccaacccacatttcctttatag

SEQ ID NO: 1457 - RNA, 23 nt, synthetic construct
  misc_feature 1..23: note = Synthetic Primer, R680
  source 1..23: mol_type = other RNA
ccaaaaccctcctgatgtacacg

SEQ ID NO: 1458 - RNA, 21 nt, synthetic construct
  misc_feature 1..21: note = Synthetic Primer, R681
  source 1..21: mol_type = other RNA
gtcacagctccagtgtctgtc

SEQ ID NO: 1459 - RNA, 24 nt, synthetic construct
  misc_feature 1..24: note = Synthetic Primer, R682
  source 1..24: mol_type = other RNA
gagatccaggctacctggtatgag

SEQ ID NO: 1460 - DNA, 20 bp, synthetic construct
  misc_feature 1..20: note = Synthetic DNA primer, R683
  modified_base 17: mod_base = OTHER; note = uracil
  source 1..20: mol_type = other DNA
aaggacgacccagagctgat

SEQ ID NO: 1461 - RNA, 25 nt, synthetic construct
  misc_feature 1..25: note = Synthetic Primer, R684
  source 1..25: mol_type = other RNA
aaattaaaaggcaagtggacttcgg

SEQ ID NO: 1462 - RNA, 23 nt, synthetic construct
  misc_feature 1..23: note = Synthetic Primer, R685
  source 1..23: mol_type = other RNA
ctgttggtgaagctaacgttgag

SEQ ID NO: 1463 - RNA, 22 nt, synthetic construct
  misc_feature 1..22: note = Synthetic Primer, R686
  source 1..22: mol_type = other RNA
aaaatgggaaaggtatccagcc

SEQ ID NO: 1464 - RNA, 26 nt, synthetic construct
  misc_feature 1..26: note = Synthetic Primer, R687
  source 1..26: mol_type = other RNA
ccacagaaacaacatcgatttcttcc

SEQ ID NO: 1465 - DNA, 18 bp, synthetic construct
  misc_feature 1..18: note = Synthetic DNA primer, R688
  modified_base 8: mod_base = OTHER; note = uracil
  modified_base 11: mod_base = OTHER; note = uracil
  modified_base 14: mod_base = OTHER; note = uracil
  modified_base 17: mod_base = OTHER; note = uracil
  source 1..18: mol_type = other DNA
acagggatggtggtggtt

SEQ ID NO: 1466 - RNA, 25 nt, synthetic construct
  misc_feature 1..25: note = Synthetic Primer, R689
  source 1..25: mol_type = other RNA
ttctggattagctggattgtcagtg

SEQ ID NO: 1467 - DNA, 23 bp, synthetic construct
  misc_feature 1..23: note = Synthetic DNA primer, R690
  modified_base 7: mod_base = OTHER; note = uracil
  modified_base 22: mod_base = OTHER; note = uracil
  source 1..23: mol_type = other DNA
ggcaaatacacagaggaagcctt

SEQ ID NO: 1468 - RNA, 23 nt, synthetic construct
  misc_feature 1..23: note = Synthetic Primer, R691
  source 1..23: mol_type = other RNA
atgtctatagggaagggaagacg

SEQ ID NO: 1469 - DNA, 21 bp, synthetic construct
  misc_feature 1..21: note = Synthetic DNA primer, R692
  modified_base 2: mod_base = OTHER; note = uracil
  modified_base 6: mod_base = OTHER; note = uracil
  modified_base 9: mod_base = OTHER; note = uracil
  modified_base 11: mod_base = OTHER; note = uracil
  modified_base 15: mod_base = OTHER; note = uracil
  modified_base 17: mod_base = OTHER; note = uracil
  source 1..21: mol_type = other DNA
gtcggtgctgtagatatccct

SEQ ID NO: 1470 - RNA, 26 nt, synthetic construct
  misc_feature 1..26: note = Synthetic Primer, R693
  source 1..26: mol_type = other RNA
acattgtcaagttctatggagtgtgc

SEQ ID NO: 1471 - DNA, 22 bp, synthetic construct
  misc_feature 1..22: note = Synthetic DNA primer, R694
  modified_base 2: mod_base = OTHER; note = uracil
  modified_base 6: mod_base = OTHER; note = uracil
  modified_base 12: mod_base = OTHER; note = uracil
  modified_base 16..18: mod_base = OTHER; note = uracil
  modified_base 21: mod_base = OTHER; note = uracil
  source 1..22: mol_type = other DNA
ctggctgaaggtgggtttgatt

SEQ ID NO: 1472 - RNA, 17 nt, synthetic construct
  misc_feature 1..17: note = Synthetic Primer, R695
  source 1..17: mol_type = other RNA
aagtcacacggccctcc

SEQ ID NO: 1473 - RNA, 28 nt, synthetic construct
  misc_feature 1..28: note = Synthetic Primer, R696
  source 1..28: mol_type = other RNA
ttgttctcattggcttcaaagatcttta

SEQ ID NO: 1474 - RNA, 24 nt, synthetic construct
  misc_feature 1..24: note = Synthetic Primer, R697
  source 1..24: mol_type = other RNA
tctcttggaaactcccatcttgag

SEQ ID NO: 1475 - RNA, 18 nt, synthetic construct
  misc_feature 1..18: note = Synthetic Primer, R698
  source 1..18: mol_type = other RNA
tgagcccacctgacttgg

SEQ ID NO: 1476 - RNA, 24 nt, synthetic construct
  misc_feature 1..24: note = Synthetic Primer, R699
  source 1..24: mol_type = other RNA
acatgagagcttgtttttcactgg

SEQ ID NO: 1477 - RNA, 25 nt, synthetic construct
  misc_feature 1..25: note = Synthetic Primer, R700
  source 1..25: mol_type = other RNA
agagtgatctctggatgtcggaata

SEQ ID NO: 1478 - RNA, 21 nt, synthetic construct
  misc_feature 1..21: note = Synthetic Primer, R701
  source 1..21: mol_type = other RNA
accagtgagggaagtgaggac

SEQ ID NO: 1479 - DNA, 28 bp, synthetic construct
  misc_feature 1..28: note = Synthetic DNA primer, R702
  modified_base 1: mod_base = OTHER; note = uracil
  modified_base 7: mod_base = OTHER; note = uracil
  modified_base 13..15: mod_base = OTHER; note = uracil
  modified_base 19..21: mod_base = OTHER; note = uracil
  modified_base 25..26: mod_base = OTHER; note = uracil
  source 1..28: mol_type = other DNA
taagcatcagcatttgactttaccttat

SEQ ID NO: 1480 - RNA, 27 nt, synthetic construct
  misc_feature 1..27: note = Synthetic Primer, R703
  source 1..27: mol_type = other RNA
caaacaagtttatatttccccatgcca

SEQ ID NO: 1481 - DNA, 28 bp, synthetic construct
  misc_feature 1..28: note = Synthetic DNA primer, R704
  modified_base 3..5: mod_base = OTHER; note = uracil
  modified_base 8: mod_base = OTHER; note = uracil
  modified_base 13: mod_base = OTHER; note = uracil
  modified_base 22: mod_base = OTHER; note = uracil
  modified_base 27: mod_base = OTHER; note = uracil
  source 1..28: mol_type = other DNA
gatttgatccagtaacaccaatagggtt

SEQ ID NO: 1482 - DNA, 26 bp, synthetic construct
  misc_feature 1..26: note = Synthetic DNA primer, R705
  modified_base 11: mod_base = OTHER; note = uracil
  modified_base 16: mod_base = OTHER; note = uracil
  modified_base 25: mod_base = OTHER; note = uracil
  source 1..26: mol_type = other DNA
aaacacaaactagagtcacacacctt

SEQ ID NO: 1483 - RNA, 23 nt, synthetic construct
  misc_feature 1..23: note = Synthetic Primer, R706
  source 1..23: mol_type = other RNA
agcacttacctgtgactccatag

SEQ ID NO: 1484 - RNA, 27 nt, synthetic construct
  misc_feature 1..27: note = Synthetic Primer, R707
  source 1..27: mol_type = other RNA
ttgtgtggaagatccaatccatttttg

SEQ ID NO: 1485 - RNA, 25 nt, synthetic construct
  misc_feature 1..25: note = Synthetic Primer, R708
  source 1..25: mol_type = other RNA
aaccatatcaaattcacacactggc

SEQ ID NO: 1486 - RNA, 27 nt, synthetic construct
  misc_feature 1..27: note = Synthetic Primer, R709
  source 1..27: mol_type = other RNA
ctcttgctcagttttatctaaggctag

SEQ ID NO: 1487 - RNA, 30 nt, synthetic construct
  misc_feature 1..30: note = Synthetic Primer, R710
  source 1..30: mol_type = other RNA
cataccaatttctcgattgaggatcttttc

SEQ ID NO: 1488 - RNA, 21 nt, synthetic construct
  misc_feature 1..21: note = Synthetic Primer, R711
  source 1..21: mol_type = other RNA
ccgcagaaatggatacaggtc

SEQ ID NO: 1489 - RNA, 30 nt, synthetic construct
  misc_feature 1..30: note = Synthetic Primer, R712
  source 1..30: mol_type = other RNA
agaaaatcaaagcattcttaccttactaca

SEQ ID NO: 1490 - DNA, 25 bp, synthetic construct
  misc_feature 1..25: note = Synthetic DNA primer, R713
  modified_base 1: mod_base = OTHER; note = uracil
  source 1..25: mol_type = other DNA
tccaggaagaggaaaggaaaaacat

SEQ ID NO: 1491 - RNA, 27 nt, synthetic construct
  misc_feature 1..27: note = Synthetic Primer, R714
  source 1..27: mol_type = other RNA
atttgccccgatgtaataaatatgcac

SEQ ID NO: 1492 - RNA, 26 nt, synthetic construct
  misc_feature 1..26: note = Synthetic Primer, R715
  source 1..26: mol_type = other RNA
gtcaagatcttcacaaaagggtttga

SEQ ID NO: 1493 - RNA, 24 nt, synthetic construct
  misc_feature 1..24: note = Synthetic Primer, R716
  source 1..24: mol_type = other RNA
gccactggtctataatccagatga

SEQ ID NO: 1494 - RNA, 25 nt, synthetic construct
  misc_feature 1..25: note = Synthetic Primer, R717
  source 1..25: mol_type = other RNA
gcatcttgttctgtttgtggaagaa

SEQ ID NO: 1495 - DNA, 23 bp, synthetic construct
  misc_feature 1..23: note = Synthetic DNA primer, R718
  modified_base 1: mod_base = OTHER; note = uracil
  modified_base 19: mod_base = OTHER; note = uracil
  modified_base 21..22: mod_base = OTHER; note = uracil
  source 1..23: mol_type = other DNA
tcaacaacccccacaaaatgttt

SEQ ID NO: 1496 - RNA, 21 nt, synthetic construct
  misc_feature 1..21: note = Synthetic Primer, R719
  source 1..21: mol_type = other RNA
tggatttgacggctcctctac

SEQ ID NO: 1497 - RNA, 24 nt, synthetic construct
  misc_feature 1..24: note = Synthetic Primer, R720
  source 1..24: mol_type = other RNA
ttaacacctccagtccctcatctg

SEQ ID NO: 1498 - RNA, 27 nt, synthetic construct
  misc_feature 1..27: note = Synthetic Primer, R721
  source 1..27: mol_type = other RNA
taagatgtccactgctgttccttcata

SEQ ID NO: 1499 - RNA, 20 nt, synthetic construct
  misc_feature 1..20: note = Synthetic Primer, R722
  source 1..20: mol_type = other RNA
cttcagccaaggcagcaatg

SEQ ID NO: 1500 - RNA, 28 nt, synthetic construct
  misc_feature 1..28: note = Synthetic Primer, R723
  source 1..28: mol_type = other RNA
gatatggattcacacagacactatcaca

SEQ ID NO: 1501 - DNA, 24 bp, synthetic construct
  misc_feature 1..24: note = Synthetic DNA primer, R724
  modified_base 6: mod_base = OTHER; note = uracil
  modified_base 8..10: mod_base = OTHER; note = uracil
  modified_base 12..14: mod_base = OTHER; note = uracil
  modified_base 17: mod_base = OTHER; note = uracil
  modified_base 20: mod_base = OTHER; note = uracil
  modified_base 22: mod_base = OTHER; note = uracil
  source 1..24: mol_type = other DNA
caaggtgtttctttgatgctctgt

SEQ ID NO: 1502 - RNA, 23 nt, synthetic construct
  misc_feature 1..23: note = Synthetic Primer, R725
  source 1..23: mol_type = other RNA
cctgtggacattggagagttgac

SEQ ID NO: 1503 - RNA, 26 nt, synthetic construct
  misc_feature 1..26: note = Synthetic Primer, R726
  source 1..26: mol_type = other RNA
gaaccttaaatgtctctcctacctga

SEQ ID NO: 1504 - RNA, 19 nt, synthetic construct
  misc_feature 1..19: note = Synthetic Primer, R727
  source 1..19: mol_type = other RNA
aaggcacctgacccaaaca

SEQ ID NO: 1505 - RNA, 20 nt, synthetic construct
  misc_feature 1..20: note = Synthetic Primer, R728
  source 1..20: mol_type = other RNA
gcacatagtcccggaagctg

SEQ ID NO: 1506 - RNA, 24 nt, synthetic construct
  misc_feature 1..24: note = Synthetic Primer, R729
  source 1..24: mol_type = other RNA
ttcttgatctcacagtcagggatg

SEQ ID NO: 1507 - DNA, 17 bp, synthetic construct
  misc_feature 1..17: note = Synthetic DNA primer, R730
  modified_base 2: mod_base = OTHER; note = uracil
  modified_base 11: mod_base = OTHER; note = uracil
  modified_base 16: mod_base = OTHER; note = uracil
  source 1..17: mol_type = other DNA
atgagcagcgtggcctt

SEQ ID NO: 1508 - RNA, 20 nt, synthetic construct
  misc_feature 1..20: note = Synthetic Primer, R731
  source 1..20: mol_type = other RNA
tagctgtgcatgtcctggtg

SEQ ID NO: 1509 - RNA, 23 nt, synthetic construct
  misc_feature 1..23: note = Synthetic Primer, R732
  source 1..23: mol_type = other RNA
taggtgaggaccacaaaccaaac

SEQ ID NO: 1510 - DNA, 21 bp, synthetic construct
  misc_feature 1..21: note = Synthetic DNA primer, R733
  modified_base 1: mod_base = OTHER; note = uracil
  modified_base 4: mod_base = OTHER; note = uracil
  modified_base 6..7: mod_base = OTHER; note = uracil
  modified_base 11: mod_base = OTHER; note = uracil
  modified_base 16: mod_base = OTHER; note = uracil
  source 1..21: mol_type = other DNA
tggtcttcactcacctcggat

SEQ ID NO: 1511 - DNA, 22 bp, synthetic construct
  misc_feature 1..22: note = Synthetic DNA primer, R734
  modified_base 1..2: mod_base = OTHER; note = uracil
  modified_base 5: mod_base = OTHER; note = uracil
  modified_base 14..15: mod_base = OTHER; note = uracil
  modified_base 20: mod_base = OTHER; note = uracil
  source 1..22: mol_type = other DNA
ttcctccagaagcttgaactct

SEQ ID NO: 1512 - DNA, 23 bp, synthetic construct
  misc_feature 1..23: note = Synthetic DNA primer, R735
  modified_base 9: mod_base = OTHER; note = uracil
  modified_base 16: mod_base = OTHER; note = uracil
  modified_base 18: mod_base = OTHER; note = uracil
  modified_base 20..21: mod_base = OTHER; note = uracil
  source 1..23: mol_type = other DNA
cccaagcctgggacctctattat

SEQ ID NO: 1513 - RNA, 19 nt, synthetic construct
  misc_feature 1..19: note = Synthetic Primer, R736
  source 1..19: mol_type = other RNA
catgctggaccttctgcac

SEQ ID NO: 1514 - RNA, 26 nt, synthetic construct
  misc_feature 1..26: note = Synthetic Primer, R737
  source 1..26: mol_type = other RNA
agactgctaaggcataggaattttcg

SEQ ID NO: 1515 - DNA, 26 bp, synthetic construct
  misc_feature 1..26: note = Synthetic DNA primer, R738
  modified_base 1..3: mod_base = OTHER; note = uracil
  modified_base 7: mod_base = OTHER; note = uracil
  modified_base 9: mod_base = OTHER; note = uracil
  modified_base 11: mod_base = OTHER; note = uracil
  modified_base 13: mod_base = OTHER; note = uracil
  modified_base 16: mod_base = OTHER; note = uracil
  modified_base 18..19: mod_base = OTHER; note = uracil
  modified_base 21: mod_base = OTHER; note = uracil
  modified_base 23..24: mod_base = OTHER; note = uracil
  source 1..26: mol_type = other DNA
tttgactctgtctcctcttgtcttct

SEQ ID NO: 1516 - RNA, 24 nt, synthetic construct
  misc_feature 1..24: note = Synthetic Primer, R739
  source 1..24: mol_type = other RNA
gagatgaagcaaacaacagtggag

SEQ ID NO: 1517 - RNA, 30 nt, synthetic construct
  misc_feature 1..30: note = Synthetic Primer, R740
  source 1..30: mol_type = other RNA
atttcatgcaaactagataactacctgtaa

SEQ ID NO: 1518 - RNA, 24 nt, synthetic construct
  misc_feature 1..24: note = Synthetic Primer, R741
  source 1..24: mol_type = other RNA
tggagtttgtctgctgaatgaacc

SEQ ID NO: 1519 - RNA, 26 nt, synthetic construct
  misc_feature 1..26: note = Synthetic Primer, R742
  source 1..26: mol_type = other RNA
agctcacagaaatgtctgctatactg

SEQ ID NO: 1520 - RNA, 24 nt, synthetic construct
  misc_feature 1..24: note = Synthetic Primer, R743
  source 1..24: mol_type = other RNA
atgaggagtgtgtactcttgcatc

SEQ ID NO: 1521 - DNA, 22 bp, synthetic construct
  misc_feature 1..22: note = Synthetic DNA primer, R744
  modified_base 9..10: mod_base = OTHER; note = uracil
  modified_base 17..18: mod_base = OTHER; note = uracil
  source 1..22: mol_type = other DNA
gccaagagttacgggattccat

SEQ ID NO: 1522 - RNA, 22 nt, synthetic construct
  misc_feature 1..22: note = Synthetic Primer, R745
  source 1..22: mol_type = other RNA
aggatgcctgaccagttagagg

SEQ ID NO: 1523 - RNA, 26 nt, synthetic construct
  misc_feature 1..26: note = Synthetic Primer, R746
  source 1..26: mol_type = other RNA
aaaagactcggatgatgtacctatgg

SEQ ID NO: 1524 - RNA, 21 nt, synthetic construct
  misc_feature 1..21: note = Synthetic Primer, R747
  source 1..21: mol_type = other RNA
cactcaccctggatgtcttcg

SEQ ID NO: 1525 - RNA, 20 nt, synthetic construct
  misc_feature 1..20: note = Synthetic Primer, R748
  source 1..20: mol_type = other RNA
caccgtagctccagacatca

SEQ ID NO: 1526 - DNA, 19 bp, synthetic construct
  misc_feature 1..19: note = Synthetic Primer, R749
  source 1..19: mol_type = other DNA
aaggagaagaggacagcgg

SEQ ID NO: 1527 - RNA, 24 nt, synthetic construct
  misc_feature 1..24: note = Synthetic Primer, R750
  source 1..24: mol_type = other RNA
cctgcacttctaggcacttactaa

SEQ ID NO: 1528 - DNA, 20 bp, synthetic construct
  misc_feature 1..20: note = Synthetic DNA primer, R751
  modified_base 6..7: mod_base = OTHER; note = uracil
  modified_base 17: mod_base = OTHER; note = uracil
  source 1..20: mol_type = other DNA
ggcacttgcacagagatgat

SEQ ID NO: 1529 - RNA, 23 nt, synthetic construct
  misc_feature 1..23: note = Synthetic Primer, R752
  source 1..23: mol_type = other RNA
atttgatgacatgtgggtggttg

SEQ ID NO: 1530 - DNA, 17 bp, synthetic construct
  misc_feature 1..17: note = Synthetic DNA primer, R753
  modified_base 8: mod_base = OTHER; note = uracil
  modified_base 10..12: mod_base = OTHER; note = uracil
  source 1..17: mol_type = other DNA
ggagccgtatttggcgt

SEQ ID NO: 1531 - RNA, 24 nt, synthetic construct
  misc_feature 1..24: note = Synthetic Primer, R754
  source 1..24: mol_type = other RNA
cctcttcacgtaggaatcctcttc

SEQ ID NO: 1532 - DNA, 26 bp, synthetic construct
  misc_feature 1..26: note = Synthetic DNA primer, R755
  modified_base 2: mod_base = OTHER; note = uracil
  modified_base 6..8: mod_base = OTHER; note = uracil
  modified_base 12: mod_base = OTHER; note = uracil
  modified_base 15: mod_base = OTHER; note = uracil
  modified_base 17: mod_base = OTHER; note = uracil
  modified_base 21: mod_base = OTHER; note = uracil
  modified_base 23: mod_base = OTHER; note = uracil
  source 1..26: mol_type = other DNA
atcactttgcgtggtgtagatatgat

SEQ ID NO: 1533 - DNA, 25 bp, synthetic construct
  misc_feature 1..25: note = Synthetic DNA primer, R756
  modified_base 6: mod_base = OTHER; note = uracil
  modified_base 8: mod_base = OTHER; note = uracil
  modified_base 14: mod_base = OTHER; note = uracil
  modified_base 16: mod_base = OTHER; note = uracil
  modified_base 20: mod_base = OTHER; note = uracil
  modified_base 22: mod_base = OTHER; note = uracil
  source 1..25: mol_type = other DNA
aggactctgaagatgtacctatggt

SEQ ID NO: 1534 - DNA, 27 bp, synthetic construct
  misc_feature 1..27: note = Synthetic DNA primer, R757
  modified_base 5..7: mod_base = OTHER; note = uracil
  modified_base 11: mod_base = OTHER; note = uracil
  modified_base 15: mod_base = OTHER; note = uracil
  modified_base 17: mod_base = OTHER; note = uracil
  modified_base 23: mod_base = OTHER; note = uracil
  modified_base 25..26: mod_base = OTHER; note = uracil
  source 1..27: mol_type = other DNA
acagtttccataggtctgaaaatgttt

SEQ ID NO: 1535 - RNA, 20 nt, synthetic construct
  misc_feature 1..20: note = Synthetic Primer, R758
  source 1..20: mol_type = other RNA
agcccaacccttgtccttac

SEQ ID NO: 1536 - RNA, 24 nt, synthetic construct
  misc_feature 1..24: note = Synthetic Primer, R759
  source 1..24: mol_type = other RNA
gggacagcatcaaatcatccattg

SEQ ID NO: 1537 - RNA, 20 nt, synthetic construct
  misc_feature 1..20: note = Synthetic Primer, R760
  source 1..20: mol_type = other RNA
ccagacggaaaccgtagctg

SEQ ID NO: 1538 - DNA, 18 bp, synthetic construct
  misc_feature 1..18: note = Synthetic DNA primer, R761
  modified_base 10: mod_base = OTHER; note = uracil
  modified_base 12: mod_base = OTHER; note = uracil
  modified_base 17: mod_base = OTHER; note = uracil
  source 1..18: mol_type = other DNA
ggagcagcctctggcatt

SEQ ID NO: 1539 - DNA, 28 bp, synthetic construct
  misc_feature 1..28: note = Synthetic DNA primer, R762
  modified_base 13: mod_base = OTHER; note = uracil
  modified_base 16: mod_base = OTHER; note = uracil
  modified_base 22: mod_base = OTHER; note = uracil
  modified_base 26: mod_base = OTHER; note = uracil
  source 1..28: mol_type = other DNA
ggcaaggaaaggtgataaaagtgaatct

SEQ ID NO: 1540 - DNA, 27 bp, synthetic construct
  misc_feature 1..27: note = Synthetic DNA primer, R763
  modified_base 3..4: mod_base = OTHER; note = uracil
  modified_base 7: mod_base = OTHER; note = uracil
  modified_base 14: mod_base = OTHER; note = uracil
  modified_base 23..24: mod_base = OTHER; note = uracil
  source 1..27: mol_type = other DNA
acttgataagaggtcccaagacttagt

SEQ ID NO: 1541 - RNA, 22 nt, synthetic construct
  misc_feature 1..22: note = Synthetic Primer, R764
  source 1..22: mol_type = other RNA
cctatggctttccaacctagga

SEQ ID NO: 1542 - DNA, 25 bp, synthetic construct
  misc_feature 1..25: note = Synthetic DNA primer, R765
  modified_base 4..5: mod_base = OTHER; note = uracil
  modified_base 7: mod_base = OTHER; note = uracil
  modified_base 9: mod_base = OTHER; note = uracil
  modified_base 11..12: mod_base = OTHER; note = uracil
  modified_base 18: mod_base = OTHER; note = uracil
  modified_base 22..24: mod_base = OTHER; note = uracil
  source 1..25: mol_type = other DNA
cccttctgtcttgaacatgagtttt

SEQ ID NO: 1543 - RNA, 26 nt, synthetic construct
  misc_feature 1..26: note = Synthetic Primer, R766
  source 1..26: mol_type = other RNA
tgtggagtatttggatgacagaaaca

SEQ ID NO: 1544 - DNA, 22 bp, synthetic construct
  misc_feature 1..22: note = Synthetic DNA primer, R767
  modified_base 6: mod_base = OTHER; note = uracil
  modified_base 8: mod_base = OTHER; note = uracil
  modified_base 11..12: mod_base = OTHER; note = uracil
  modified_base 15: mod_base = OTHER; note = uracil
  modified_base 19: mod_base = OTHER; note = uracil
  source 1..22: mol_type = other DNA
aggcctctgattcctcactgat

SEQ ID NO: 1545 - DNA, 20 bp, synthetic construct
  misc_feature 1..20: note = Synthetic DNA primer, R768
  modified_base 3: mod_base = OTHER; note = uracil
  modified_base 7..8: mod_base = OTHER; note = uracil
  modified_base 12: mod_base = OTHER; note = uracil
  modified_base 14: mod_base = OTHER; note = uracil
  modified_base 18: mod_base = OTHER; note = uracil
  source 1..20: mol_type = other DNA
cctaggttggctctgactgt

SEQ ID NO: 1546 - DNA, 22 bp, synthetic construct
  misc_feature 1..22: note = Synthetic DNA primer, R769
  modified_base 1: mod_base = OTHER; note = uracil
  modified_base 5: mod_base = OTHER; note = uracil
  modified_base 7..8: mod_base = OTHER; note = uracil
  modified_base 11..12: mod_base = OTHER; note = uracil
  modified_base 14: mod_base = OTHER; note = uracil
  modified_base 16..19: mod_base = OTHER; note = uracil
  source 1..22: mol_type = other DNA
tgcctcttgcttctcttttcct

SEQ ID NO: 1547 - RNA, 20 nt, synthetic construct
  misc_feature 1..20: note = Synthetic Primer, R770
  source 1..20: mol_type = other RNA
ttcctacagtactcccctgc

SEQ ID NO: 1548 - RNA, 19 nt, synthetic construct
  misc_feature 1..19: note = Synthetic Primer, R771
  source 1..19: mol_type = other RNA
agtcacagcacatgacgga

SEQ ID NO: 1549 - RNA, 20 nt, synthetic construct
  misc_feature 1..20: note = Synthetic Primer, F772
  source 1..20: mol_type = other RNA
ggaggaggcgatggctacta

SEQ ID NO: 1550 - RNA, 24 nt, synthetic construct
  misc_feature 1..24: note = Synthetic Primer, F773
  source 1..24: mol_type = other RNA
ggagacctacaaactgaagtgcaa

SEQ ID NO: 1551 - RNA, 22 nt, synthetic construct
  misc_feature 1..22: note = Synthetic Primer, F774
  source 1..22: mol_type = other RNA
ccatgcagaatgccaccaagta

SEQ ID NO: 1552 - RNA, 19 nt, synthetic construct
  misc_feature 1..19: note = Synthetic Primer, F775
  source 1..19: mol_type = other RNA
caggcactccttggagcaa

SEQ ID NO: 1553 - RNA, 22 nt, synthetic construct
  misc_feature 1..22: note = Synthetic Primer, F776
  source 1..22: mol_type = other RNA
ctgtttgaaatgagcaggcact

SEQ ID NO: 1554 - RNA, 19 nt, synthetic construct
  misc_feature 1..19: note = Synthetic Primer, F777
  source 1..19: mol_type = other RNA
actggaggacccgtcttct

SEQ ID NO: 1555 - RNA, 24 nt, synthetic construct
  misc_feature 1..24: note = Synthetic Primer, F778
  source 1..24: mol_type = other RNA
agaccttaagggaacagctctcat

SEQ ID NO: 1556 - RNA, 26 nt, synthetic construct
  misc_feature 1..26: note = Synthetic Primer, F779
  source 1..26: mol_type = other RNA
gtggagtcatgcttatatggagcaaa

SEQ ID NO: 1557 - RNA, 27 nt, synthetic construct
  misc_feature 1..27: note = Synthetic Primer, F780
  source 1..27: mol_type = other RNA
gacagaaaaataattctgtgggatcat

SEQ ID NO: 1558 - RNA, 28 nt, synthetic construct
  misc_feature 1..28: note = Synthetic Primer, F781
  source 1..28: mol_type = other RNA
tcctgaaagagaaatagaggttcctgat

SEQ ID NO: 1559 - DNA, 18 bp, synthetic construct
  misc_feature 1..18: note = Synthetic Primer, F782
  source 1..18: mol_type = other DNA
ggtggccataggaacgca

SEQ ID NO: 1560 - RNA, 25 nt, synthetic construct
  misc_feature 1..25: note = Synthetic Primer, F783
  source 1..25: mol_type = other RNA
tggatgcagaaaccagagatctagt

SEQ ID NO: 1561 - RNA, 22 nt, synthetic construct
  misc_feature 1..22: note = Synthetic Primer, F784
  source 1..22: mol_type = other RNA
ctggtccccagacaacaagtat

SEQ ID NO: 1562 - RNA, 23 nt, synthetic construct
  misc_feature 1..23: note = Synthetic Primer, F785
  source 1..23: mol_type = other RNA
gaagatcatgtggcctcagtgaa

SEQ ID NO: 1563 - RNA, 27 nt, synthetic construct
  misc_feature 1..27: note = Synthetic Primer, F786
  source 1..27: mol_type = other RNA
gtcgaaaataccttcaacacccaaatt

SEQ ID NO: 1564 - RNA, 27 nt, synthetic construct
  misc_feature 1..27: note = Synthetic Primer, F787
  source 1..27: mol_type = other RNA
ccaaaactgcagacaagcataaagatg

SEQ ID NO: 1565 - RNA, 22 nt, synthetic construct
  misc_feature 1..22: note = Synthetic Primer, F788
  source 1..22: mol_type = other RNA
caggcagaagttgatcgactct

SEQ ID NO: 1566 - RNA, 27 nt, synthetic construct
  misc_feature 1..27: note = Synthetic Primer, F789
  source 1..27: mol_type = other RNA
aaagaagagtgcacaaatgttagagga

SEQ ID NO: 1567 - RNA, 24 nt, synthetic construct
  misc_feature 1..24: note = Synthetic Primer, F790
  source 1..24: mol_type = other RNA
ccagcttcctataacttggacgat

SEQ ID NO: 1568 - RNA, 23 nt, synthetic construct
  misc_feature 1..23: note = Synthetic Primer, F791
  source 1..23: mol_type = other RNA
gaaccacatcatggtctctgtct

SEQ ID NO: 1569 - RNA, 21 nt, synthetic construct
  misc_feature 1..21: note = Synthetic Primer, F792
  source 1..21: mol_type = other RNA
tcatcgggaagacctggctta

SEQ ID NO: 1570 - RNA, 23 nt, synthetic construct
  misc_feature 1..23: note = Synthetic Primer, F793
  source 1..23: mol_type = other RNA
gctgcaggactatgaggagaaga

SEQ ID NO: 1571 - RNA, 20 nt, synthetic construct
  misc_feature 1..20: note = Synthetic Primer, F794
  source 1..20: mol_type = other RNA
ctcccagagaccaacgttca

SEQ ID NO: 1572 - RNA, 20 nt, synthetic construct
  misc_feature 1..20: note = Synthetic Primer, F795
  source 1..20: mol_type = other RNA
ggacctggaccgtgtcctta

SEQ ID NO: 1573 - RNA, 20 nt, synthetic construct
  misc_feature 1..20: note = Synthetic Primer, F796
  source 1..20: mol_type = other RNA
ggacctggaccgtgtcctta

SEQ ID NO: 1574 - RNA, 22 nt, synthetic construct
  misc_feature 1..22: note = Synthetic Primer, R772a
  source 1..22: mol_type = other RNA
ctgcagttagaggttggtgaca

SEQ ID NO: 1575 - RNA, 19 nt, synthetic construct
  misc_feature 1..19: note = Synthetic Primer, R772b
  source 1..19: mol_type = other RNA
cccgccaagcacgtatact

SEQ ID NO: 1576 - RNA, 20 nt, synthetic construct
  misc_feature 1..20: note = Synthetic Primer, R773a
  source 1..20: mol_type = other RNA
ccggaagaggagtagctgac

SEQ ID NO: 1577 - RNA, 27 nt, synthetic construct
  misc_feature 1..27: note = Synthetic Primer, R773b
  source 1..27: mol_type = other RNA
ctcctagagtttttccaagaaccaagt

SEQ ID NO: 1578 - RNA, 26 nt, synthetic construct
  misc_feature 1..26: note = Synthetic Primer, R774
  source 1..26: mol_type = other RNA
atttgcagctactactctgaactgaa

SEQ ID NO: 1579 - RNA, 26 nt, synthetic construct
  misc_feature 1..26: note = Synthetic Primer, R775
  source 1..26: mol_type = other RNA
tcagtgggattgtaacaaccagaaat

SEQ ID NO: 1580 - RNA, 20 nt, synthetic construct
  misc_feature 1..20: note = Synthetic Primer, R776
  source 1..20: mol_type = other RNA
gcactgtcaccccttccttg

SEQ ID NO: 1581 - RNA, 19 nt, synthetic construct
  misc_feature 1..19: note = Synthetic Primer, R779
  source 1..19: mol_type = other RNA
gctccatctgcatggcttg

SEQ ID NO: 1582 - RNA, 22 nt, synthetic construct
  misc_feature 1..22: note = Synthetic Primer, R780
  source 1..22: mol_type = other RNA
gggttgtagtcggtcatgatgg

SEQ ID NO: 1583 - RNA, 19 nt, synthetic construct
  misc_feature 1..19: note = Synthetic Primer, R781
  source 1..19: mol_type = other RNA
cctggcccttgaagcacta

SEQ ID NO: 1584 - RNA, 20 nt, synthetic construct
  misc_feature 1..20: note = Synthetic Primer, R782
  source 1..20: mol_type = other RNA
accccatcttccccatccat

SEQ ID NO: 1585 - RNA, 24 nt, synthetic construct
  misc_feature 1..24: note = Synthetic Primer, R786
  source 1..24: mol_type = other RNA
ctacctcacagtgactgcagttta

SEQ ID NO: 1586 - RNA, 21 nt, synthetic construct
  misc_feature 1..21: note = Synthetic Primer, R787
  source 1..21: mol_type = other RNA
agagaggatcagcgagagtgg

SEQ ID NO: 1587 - RNA, 20 nt, synthetic construct
  misc_feature 1..20: note = Synthetic Primer, R788
  source 1..20: mol_type = other RNA
gtctcgttgcccaaattgat

SEQ ID NO: 1588 - RNA, 27 nt, synthetic construct
  misc_feature 1..27: note = Synthetic Primer, R789
  source 1..27: mol_type = other RNA
agtgttttcattcgattcctgtcttct

SEQ ID NO: 1589 - RNA, 20 nt, synthetic construct
  misc_feature 1..20: note = Synthetic Primer, R791
  source 1..20: mol_type = other RNA
ggtgatgccgtggttgatgt

SEQ ID NO: 1590 - RNA, 20 nt, synthetic construct
  misc_feature 1..20: note = Synthetic Primer, R792
  source 1..20: mol_type = other RNA
agttctcgcttcagcacgat

SEQ ID NO: 1591 - RNA, 20 nt, synthetic construct
  misc_feature 1..20: note = Synthetic Primer, R794
  source 1..20: mol_type = other RNA
tggccaagcaatctgcgtat

SEQ ID NO: 1592 - RNA, 23 nt, synthetic construct
  misc_feature 1..23: note = Synthetic Primer, R795
  source 1..23: mol_type = other RNA
tgccaggatcatagcgtttacag

SEQ ID NO: 1593 - RNA, 22 nt, synthetic construct
  misc_feature 1..22: note = Synthetic Primer, R796a
  source 1..22: mol_type = other RNA
ctggagcaggtccactataggt

SEQ ID NO: 1594 - RNA, 19 nt, synthetic construct
  misc_feature 1..19: note = Synthetic Primer, R796b
  source 1..19: mol_type = other RNA
tcctcacacctgctcctca

SEQ ID NO: 1595 - RNA, 18 nt, synthetic construct
  misc_feature 1..18: note = Synthetic Primer, R796c
  source 1..18: mol_type = other RNA
gctgatgggtgggcactg

SEQ ID NO: 1596 - RNA, 20 nt, synthetic construct
  misc_feature 1..20: note = Synthetic Primer, R796d
  source 1..20: mol_type = other RNA
ggtctaccaggactgtccct

SEQ ID NO: 1597 - RNA, 25 nt, synthetic construct
  misc_feature 1..25: note = Synthetic Primer, R797
  source 1..25: mol_type = other RNA
ggaaggcaggaagattttcaatctc

SEQ ID NO: 1598 - RNA, 24 nt, synthetic construct
  misc_feature 1..24: note = Synthetic Primer, R798
  source 1..24: mol_type = other RNA
cgtttataagcactgtcacccctt

SEQ ID NO: 1599 - RNA, 21 nt, synthetic construct
  misc_feature 1..21: note = Synthetic Primer, R801
  source 1..21: mol_type = other RNA
aggatgatggcactgaactcc

SEQ ID NO: 1600 - RNA, 25 nt, synthetic construct
  misc_feature 1..25: note = Synthetic Primer, R802
  source 1..25: mol_type = other RNA
cacgttagttagtgagccaggtaat

SEQ ID NO: 1601 - RNA, 19 nt, synthetic construct
  misc_feature 1..19: note = Synthetic Primer, R803
  source 1..19: mol_type = other RNA
ctcagggctctgcagctcc

SEQ ID NO: 1602 - RNA, 19 nt, synthetic construct
  misc_feature 1..19: note = Synthetic Primer, R804
  source 1..19: mol_type = other RNA
cctccggaaggtcatctca

SEQ ID NO: 1603 - RNA, 27 nt, synthetic construct
  misc_feature 1..27: note = Synthetic Primer, R806b
  source 1..27: mol_type = other RNA
ctcctagagtttttccaagaaccaagt

SEQ ID NO: 1604 - RNA, 23 nt, synthetic construct
  misc_feature 1..23: note = Synthetic Primer, R807
  source 1..23: mol_type = other RNA
gaaccaagttcttccgagggaat

SEQ ID NO: 1605 - RNA, 18 nt, synthetic construct
  misc_feature 1..18: note = Synthetic Primer, R809
  source 1..18: mol_type = other RNA
acagcggctgcgatcacc

SEQ ID NO: 1606 - RNA, 19 nt, synthetic construct
  misc_feature 1..19: note = Synthetic Primer, R811
  source 1..19: mol_type = other RNA
gctgactgcacaggacagg

SEQ ID NO: 1607 - RNA, 21 nt, synthetic construct
  misc_feature 1..21: note = Synthetic Primer, R813a
  source 1..21: mol_type = other RNA
cgagaccccaaaaggtgtttc

SEQ ID NO: 1608 - RNA, 23 nt, synthetic construct
  misc_feature 1..23: note = Synthetic Primer, R813b
  source 1..23: mol_type = other RNA
tccacatttgttgagcacaagga

SEQ ID NO: 1609 - RNA, 27 nt, synthetic construct
  misc_feature 1..27: note = Synthetic Primer, R815
  source 1..27: mol_type = other RNA
cacctttaactgcttcagggtcaatat

SEQ ID NO: 1610 - RNA, 18 nt, synthetic construct
  misc_feature 1..18: note = Synthetic Primer, R816
  source 1..18: mol_type = other RNA
tgttgtcccgtggccatt

SEQ ID NO: 1611 - RNA, 21 nt, synthetic construct
  misc_feature 1..21: note = Synthetic Primer, R817
  source 1..21: mol_type = other RNA
ggcatgaaccgttctgagatg

SEQ ID NO: 1612 - RNA, 23 nt, synthetic construct
  misc_feature 1..23: note = Synthetic Primer, R818
  source 1..23: mol_type = other RNA
ccaaattcgccttctcctagagt

SEQ ID NO: 1613 - RNA, 22 nt, synthetic construct
  misc_feature 1..22: note = Synthetic Primer, R819
  source 1..22: mol_type = other RNA
ctcctctgcaccaaggtaaaca

SEQ ID NO: 1614 - RNA, 25 nt, synthetic construct
  misc_feature 1..25: note = Synthetic Primer, R820
  source 1..25: mol_type = other RNA
tcccttctagtaatttgggaatgcc

SEQ ID NO: 1615 - RNA, 28 nt, synthetic construct
  misc_feature 1..28: note = Synthetic Primer, R823
  source 1..28: mol_type = other RNA
tcagctttctcccactgtattgaatttt

SEQ ID NO: 1616 - RNA, 20 nt, synthetic construct
  misc_feature 1..20: note = Synthetic Primer, R824
  source 1..20: mol_type = other RNA
tcggaagggctgtggaattg

SEQ ID NO: 1617 - RNA, 22 nt, synthetic construct
  misc_feature 1..22: note = Synthetic Primer, R824b
  source 1..22: mol_type = other RNA
cgtaggcacactcaaacaacga

SEQ ID NO: 1618 - RNA, 24 nt, synthetic construct
  misc_feature 1..24: note = Synthetic Primer, R825
  source 1..24: mol_type = other RNA
ctgatttctgaacatggactgtgg

SEQ ID NO: 1619 - RNA, 23 nt, synthetic construct
  misc_feature 1..23: note = Synthetic Primer, R826
  source 1..23: mol_type = other RNA
acgaagtgcaatggtctttaggt

SEQ ID NO: 1620 - RNA, 25 nt, synthetic construct
  misc_feature 1..25: note = Synthetic Primer, R828
  source 1..25: mol_type = other RNA
gtgagtcatttgtcttgcttttggt

SEQ ID NO: 1621 - RNA, 25 nt, synthetic construct
  misc_feature 1..25: note = Synthetic Primer, F829
  source 1..25: mol_type = other RNA
gacagtctgaatcatgtccttcagt

SEQ ID NO: 1622 - RNA, 18 nt, synthetic construct
  misc_feature 1..18: note = Synthetic Primer, F830
  source 1..18: mol_type = other RNA
gggctgcccaccatcttc

SEQ ID NO: 1623 - RNA, 25 nt, synthetic construct
  misc_feature 1..25: note = Synthetic Primer, F831
  source 1..25: mol_type = other RNA
tcagcctgatagtctggtacaaact

SEQ ID NO: 1624 - RNA, 20 nt, synthetic construct
  misc_feature 1..20: note = Synthetic Primer, R833
  source 1..20: mol_type = other RNA
cctccaccttgggctactca

SEQ ID NO: 1625 - RNA, 19 nt, synthetic construct
  misc_feature 1..19: note = Synthetic Primer, R834
  source 1..19: mol_type = other RNA
gggtgagccttgacacaca

SEQ ID NO: 1626 - RNA, 22 nt, synthetic construct
  misc_feature 1..22: note = Synthetic Primer, R835
  source 1..22: mol_type = other RNA
cagggatcagttcagctgtacc

SEQ ID NO: 1627 - RNA, 21 nt, synthetic construct
  misc_feature 1..21: note = Synthetic Primer, F838
  source 1..21: mol_type = other RNA
tgggctctgtaaagaatagtg

SEQ ID NO: 1628 - RNA, 21 nt, synthetic construct
  misc_feature 1..21: note = Synthetic Primer, F839
  source 1..21: mol_type = other RNA
tgcacacttggacagcatttc

SEQ ID NO: 1629 - RNA, 26 nt, synthetic construct
  misc_feature 1..26: note = Synthetic Primer, F840
  source 1..26: mol_type = other RNA
ccaggaccaatctggtcacaaacata

SEQ ID NO: 1630 - DNA, 23 bp, synthetic construct
  misc_feature 1..23: note = Synthetic DNA primer, F841
  modified_base 3: mod_base = OTHER; note = uracil
  modified_base 18: mod_base = OTHER; note = uracil
  source 1..23: mol_type = other DNA
ggtgggaggaaaagacataggat

SEQ ID NO: 1631 - RNA, 24 nt, synthetic construct
  misc_feature 1..24: note = Synthetic Primer, F842
  source 1..24: mol_type = other RNA
ctccagagagaaagaatcaacagg

SEQ ID NO: 1632 - RNA, 20 nt, synthetic construct
  misc_feature 1..20: note = Synthetic Primer, F843
  source 1..20: mol_type = other RNA
gcatccgtgactctctggac

SEQ ID NO: 1633 - RNA, 28 nt, synthetic construct
  misc_feature 1..28: note = Synthetic Primer, F844
  source 1..28: mol_type = other RNA
tcagtgagccaattccttgtaataactc

SEQ ID NO: 1634 - DNA, 22 bp, synthetic construct
  misc_feature 1..22: note = Synthetic DNA primer, F845
  modified_base 5: mod_base = OTHER; note = uracil
  modified_base 13: mod_base = OTHER; note = uracil
  modified_base 15..16: mod_base = OTHER; note = uracil
  modified_base 19: mod_base = OTHER; note = uracil
  modified_base 21: mod_base = OTHER; note = uracil
  source 1..22: mol_type = other DNA
cagatcccaagctcttcctctt

SEQ ID NO: 1635 - DNA, 22 bp, synthetic construct
  misc_feature 1..22: note = Synthetic DNA primer, F846
  modified_base 2..3: mod_base = OTHER; note = uracil
  modified_base 6: mod_base = OTHER; note = uracil
  modified_base 12: mod_base = OTHER; note = uracil
  modified_base 17..18: mod_base = OTHER; note = uracil
  source 1..22: mol_type = other DNA
gttcatgccactgcacttcact

SEQ ID NO: 1636 - DNA, 20 bp, synthetic construct
  misc_feature 1..20: note = Synthetic DNA primer, F847
  modified_base 3: mod_base = OTHER; note = uracil
  modified_base 11..12: mod_base = OTHER; note = uracil
  source 1..20: mol_type = other DNA
ggtgcacccattacccgaat

SEQ ID NO: 1637 - DNA, 25 bp, synthetic construct
  misc_feature 1..25: note = Synthetic DNA primer, F848
  modified_base 1: mod_base = OTHER; note = uracil
  modified_base 7: mod_base = OTHER; note = uracil
  modified_base 9: mod_base = OTHER; note = uracil
  modified_base 13..14: mod_base = OTHER; note = uracil
  modified_base 21: mod_base = OTHER; note = uracil
  modified_base 23: mod_base = OTHER; note = uracil
  source 1..25: mol_type = other DNA
tccccatataagttcaagcctgtgt

SEQ ID NO: 1638 - DNA, 27 bp, synthetic construct
  misc_feature 1..27: note = Synthetic DNA primer, F849
  modified_base 1..2: mod_base = OTHER; note = uracil
  modified_base 4: mod_base = OTHER; note = uracil
  modified_base 6: mod_base = OTHER; note = uracil
  modified_base 10: mod_base = OTHER; note = uracil
  modified_base 15..19: mod_base = OTHER; note = uracil
  modified_base 21: mod_base = OTHER; note = uracil
  modified_base 23..24: mod_base = OTHER; note = uracil
  source 1..27: mol_type = other DNA
ttgtatagctacagtttttctgttggt

SEQ ID NO: 1639 - RNA, 27 nt, synthetic construct
  misc_feature 1..27: note = Synthetic Primer, F850
  source 1..27: mol_type = other RNA
taaatatgtgagtcaattccccaagtg

SEQ ID NO: 1640 - DNA, 27 bp, synthetic construct
  misc_feature 1..27: note = Synthetic DNA primer, F851
  modified_base 4: mod_base = OTHER; note = uracil
  modified_base 8..11: mod_base = OTHER; note = uracil
  modified_base 18: mod_base = OTHER; note = uracil
  modified_base 21: mod_base = OTHER; note = uracil
  modified_base 24: mod_base = OTHER; note = uracil
  source 1..27: mol_type = other DNA
ggctagattttccccgatgatagtagt

SEQ ID NO: 1641 - DNA, 27 bp, synthetic construct
  misc_feature 1..27: note = Synthetic DNA primer, F852
  modified_base 4: mod_base = OTHER; note = uracil
  modified_base 8..11: mod_base = OTHER; note = uracil
  modified_base 16: mod_base = OTHER; note = uracil
  modified_base 18: mod_base = OTHER; note = uracil
  modified_base 21: mod_base = OTHER; note = uracil
  modified_base 24: mod_base = OTHER; note = uracil
  source 1..27: mol_type = other DNA
ggctagattttcccctatgatagtagt

SEQ ID NO: 1642 - RNA, 24 nt, synthetic construct
  misc_feature 1..24: note = Synthetic Primer, F853
  source 1..24: mol_type = other RNA
cagtaagttaaaggattgcaggag

SEQ ID NO: 1643 - RNA, 28 nt, synthetic construct
  misc_feature 1..28: note = Synthetic Primer, F854
  source 1..28: mol_type = other RNA
tgtgtatatgcatttacctgtgagtatg

SEQ ID NO: 1644 - DNA, 24 bp, synthetic construct
  misc_feature 1..24: note = Synthetic DNA primer, F855
  modified_base 1: mod_base = OTHER; note = uracil
  modified_base 3: mod_base = OTHER; note = uracil
  modified_base 13: mod_base = OTHER; note = uracil
  modified_base 21: mod_base = OTHER; note = uracil
  source 1..24: mol_type = other DNA
tgtaacaagggctacaggaatcat

SEQ ID NO: 1645 - RNA, 27 nt, synthetic construct
  misc_feature 1..27: note = Synthetic Primer, F856
  source 1..27: mol_type = other RNA
gggcatctcttatactcatgaaatcaa

SEQ ID NO: 1646 - DNA, 25 bp, synthetic construct
  misc_feature 1..25: note = Synthetic DNA primer, F857
  modified_base 2: mod_base = OTHER; note = uracil
  modified_base 4: mod_base = OTHER; note = uracil
  modified_base 14: mod_base = OTHER; note = uracil
  source 1..25: mol_type = other DNA
ctatgcagaagaatgaaccagggat

SEQ ID NO: 1647 - RNA, 28 nt, synthetic construct
  misc_feature 1..28: note = Synthetic Primer, F858
  source 1..28: mol_type = other RNA
tgattcatttccatagggtaagtgaaaa

SEQ ID NO: 1648 - RNA, 26 nt, synthetic construct
  misc_feature 1..26: note = Synthetic Primer, F859
  source 1..26: mol_type = other RNA
gacattatcaccaatttttctagacg

SEQ ID NO: 1649 - RNA, 26 nt, synthetic construct
  misc_feature 1..26: note = Synthetic Primer, F860
  source 1..26: mol_type = other RNA
gacattctcaccaatttttctagacg

SEQ ID NO: 1650 - RNA, 22 nt, synthetic construct
  misc_feature 1..22: note = Synthetic Primer, F861
  source 1..22: mol_type = other RNA
tgtgacaagggtgattttcctc

SEQ ID NO: 1651 - DNA, 25 bp, synthetic construct
  misc_feature 1..25: note = Synthetic DNA primer, F862
  modified_base 3: mod_base = OTHER; note = uracil
  modified_base 6..7: mod_base = OTHER; note = uracil
  modified_base 9: mod_base = OTHER; note = uracil
  modified_base 11: mod_base = OTHER; note = uracil
  modified_base 19..20: mod_base = OTHER; note = uracil
  source 1..25: mol_type = other DNA
cataattgtatgagccacttcccat

SEQ ID NO: 1652 - DNA, 26 bp, synthetic construct
  misc_feature 1..26: note = Synthetic DNA primer, F863
  modified_base 5: mod_base = OTHER; note = uracil
  modified_base 11: mod_base = OTHER; note = uracil
  modified_base 13: mod_base = OTHER; note = uracil
  modified_base 23: mod_base = OTHER; note = uracil
  modified_base 25: mod_base = OTHER; note = uracil
  source 1..26: mol_type = other DNA
agactcacaatgtacaaaagcctatt

SEQ ID NO: 1653 - RNA, 33 nt, synthetic construct
  misc_feature 1..33: note = Synthetic Primer, F864
  source 1..33: mol_type = other RNA
aatatatataaagggtatgatagaacacttgtc

SEQ ID NO: 1654 - DNA, 30 bp, synthetic construct
  misc_feature 1..30: note = Synthetic DNA primer, F865
  modified_base 5: mod_base = OTHER; note = uracil
  modified_base 12..13: mod_base = OTHER; note = uracil
  modified_base 15: mod_base = OTHER; note = uracil
  modified_base 17: mod_base = OTHER; note = uracil
  modified_base 19: mod_base = OTHER; note = uracil
  modified_base 21..25: mod_base = OTHER; note = uracil
  modified_base 27: mod_base = OTHER; note = uracil
  modified_base 29: mod_base = OTHER; note = uracil
  source 1..30: mol_type = other DNA
ggcctggcaacttatatgtatttttgtatt

SEQ ID NO: 1655 - DNA, 30 bp, synthetic construct
  misc_feature 1..30: note = Synthetic DNA primer, F866
  modified_base 5: mod_base = OTHER; note = uracil
  modified_base 12..13: mod_base = OTHER; note = uracil
  modified_base 15: mod_base = OTHER; note = uracil
  modified_base 17: mod_base = OTHER; note = uracil
  modified_base 19: mod_base = OTHER; note = uracil
  modified_base 21..25: mod_base = OTHER; note = uracil
  modified_base 27: mod_base = OTHER; note = uracil
  modified_base 29: mod_base = OTHER; note = uracil
  source 1..30: mol_type = other DNA
ggcctgacaacttatatgtatttttgtatt

SEQ ID NO: 1656 - RNA, 33 nt, synthetic construct
  misc_feature 1..33: note = Synthetic Primer, F867
  source 1..33: mol_type = other RNA
ccatccttatctcttgtgtatctattcattcaa

SEQ ID NO: 1657 - RNA, 25 nt, synthetic construct
  misc_feature 1..25: note = Synthetic Primer, F868
  source 1..25: mol_type = other RNA
gatttgtctgtaattgccagcaaaa

SEQ ID NO: 1658 - RNA, 22 nt, synthetic construct
  misc_feature 1..22: note = Synthetic Primer, F869
  source 1..22: mol_type = other RNA
gagcaagacaccatctcaagaa

SEQ ID NO: 1659 - DNA, 28 bp, synthetic construct
  misc_feature 1..28: note = Synthetic DNA primer, F870
  modified_base 3: mod_base = OTHER; note = uracil
  modified_base 6..7: mod_base = OTHER; note = uracil
  modified_base 10: mod_base = OTHER; note = uracil
  modified_base 14: mod_base = OTHER; note = uracil
  modified_base 23..24: mod_base = OTHER; note = uracil
  modified_base 26: mod_base = OTHER; note = uracil
  source 1..28: mol_type = other DNA
catgattgatacatggaaagaattctct

SEQ ID NO: 1660 - RNA, 24 nt, synthetic construct
  misc_feature 1..24: note = Synthetic Primer, F871
  source 1..24: mol_type = other RNA
acccaaatcaactcaactccagtg

SEQ ID NO: 1661 - DNA, 28 bp, synthetic construct
  misc_feature 1..28: note = Synthetic DNA primer, F872
  modified_base 1..2: mod_base = OTHER; note = uracil
  modified_base 9..11: mod_base = OTHER; note = uracil
  modified_base 16: mod_base = OTHER; note = uracil
  modified_base 26: mod_base = OTHER; note = uracil
  source 1..28: mol_type = other DNA
ttagagcatttaaagtaagccacagtgt

SEQ ID NO: 1662 - DNA, 21 bp, synthetic construct
  misc_feature 1..21: note = Synthetic DNA primer, F873
  modified_base 2: mod_base = OTHER; note = uracil
  modified_base 4: mod_base = OTHER; note = uracil
  modified_base 14..15: mod_base = OTHER; note = uracil
  source 1..21: mol_type = other DNA
ctgtacacagggcttccgagt

SEQ ID NO: 1663 - RNA, 24 nt, synthetic construct
  misc_feature 1..24: note = Synthetic Primer, F874
  source 1..24: mol_type = other RNA
tttcagggctgtgatcactagcac

SEQ ID NO: 1664 - RNA, 31 nt, synthetic construct
  misc_feature 1..31: note = Synthetic Primer, F875
  source 1..31: mol_type = other RNA
agatacataggttagatagagataggacaga

SEQ ID NO: 1665 - RNA, 21 nt, synthetic construct
  misc_feature 1..21: note = Synthetic Primer, R838a
  source 1..21: mol_type = other RNA
atcagagcttaaactgggaag

SEQ ID NO: 1666 - RNA, 21 nt, synthetic construct
  misc_feature 1..21: note = Synthetic Primer, R838b
  source 1..21: mol_type = other RNA
atcagagcttaaactgggaaa

SEQ ID NO: 1667 - RNA, 29 nt, synthetic construct
  misc_feature 1..29: note = Synthetic Primer, R839
  source 1..29: mol_type = other RNA
gtctcagttttcctacctgtaaaatgaag

SEQ ID NO: 1668 - DNA, 28 bp, synthetic construct
  misc_feature 1..28: note = Synthetic DNA primer, R840
  modified_base 3..4: mod_base = OTHER; note = uracil
  modified_base 6..7: mod_base = OTHER; note = uracil
  modified_base 9: mod_base = OTHER; note = uracil
  modified_base 15..16: mod_base = OTHER; note = uracil
  modified_base 18: mod_base = OTHER; note = uracil
  modified_base 20..24: mod_base = OTHER; note = uracil
  source 1..28: mol_type = other DNA
acttattctgacagttctctttttccct

SEQ ID NO: 1669 - RNA, 23 nt, synthetic construct
  misc_feature 1..23: note = Synthetic Primer, R841
  source 1..23: mol_type = other RNA
ggtggcagtgagctgtaacagta

SEQ ID NO: 1670 - RNA, 22 nt, synthetic construct
  misc_feature 1..22: note = Synthetic Primer, R842
  source 1..22: mol_type = other RNA
tcagcctccatatcacttgagc

SEQ ID NO: 1671 - RNA, 21 nt, synthetic construct
  misc_feature 1..21: note = Synthetic Primer, R843
  source 1..21: mol_type = other RNA
aacttgggttgagccataggc

SEQ ID NO: 1672 - RNA, 27 nt, synthetic construct
  misc_feature 1..27: note = Synthetic Primer, R844
  source 1..27: mol_type = other RNA
cctggttccatggattccacattaaga

SEQ ID NO: 1673 - DNA, 20 bp, synthetic construct
  misc_feature 1..20: note = Synthetic DNA primer, R845
  modified_base 4..6: mod_base = OTHER; note = uracil
  modified_base 8: mod_base = OTHER; note = uracil
  modified_base 10: mod_base = OTHER; note = uracil
  modified_base 12: mod_base = OTHER; note = uracil
  modified_base 16: mod_base = OTHER; note = uracil
  modified_base 18: mod_base = OTHER; note = uracil
  source 1..20: mol_type = other DNA
gcgtttgtgtgtgcatctgt

SEQ ID NO: 1674 - RNA, 23 nt, synthetic construct
  misc_feature 1..23: note = Synthetic Primer, R846
  source 1..23: mol_type = other RNA
tctggtgtgtggagatgtcttac

SEQ ID NO: 1675 - RNA, 25 nt, synthetic construct
  misc_feature 1..25: note = Synthetic Primer, R847a
  source 1..25: mol_type = other RNA
ggctgcaaaaagctataattgtacc

SEQ ID NO: 1676 - RNA, 25 nt, synthetic construct
  misc_feature 1..25: note = Synthetic Primer, R847b
  source 1..25: mol_type = other RNA
ggctgcaaaaagctataactgtacc

SEQ ID NO: 1677 - RNA, 25 nt, synthetic construct
  misc_feature 1..25: note = Synthetic Primer, R848
  source 1..25: mol_type = other RNA
tgtgttagtcaggattcttcagaga

SEQ ID NO: 1678 - RNA, 31 nt, synthetic construct
  misc_feature 1..31: note = Synthetic Primer, R849
  source 1..31: mol_type = other RNA
ttcagttatatgtgtataaatgtgtgcattg

SEQ ID NO: 1679 - RNA, 26 nt, synthetic construct
  misc_feature 1..26: note = Synthetic Primer, R850
  source 1..26: mol_type = other RNA
ctccagagacagactaataggaggta

SEQ ID NO: 1680 - DNA, 22 bp, synthetic construct
  misc_feature 1..22: note = Synthetic DNA primer, R851
  modified_base 3: mod_base = OTHER; note = uracil
  modified_base 5: mod_base = OTHER; note = uracil
  modified_base 13..14: mod_base = OTHER; note = uracil
  source 1..22: mol_type = other DNA
cctgtgcccaagttgagagaat

SEQ ID NO: 1681 - RNA, 20 nt, synthetic construct
  misc_feature 1..20: note = Synthetic Primer, R853
  source 1..20: mol_type = other RNA
taatccagctgtgggaggga

SEQ ID NO: 1682 - RNA, 20 nt, synthetic construct
  misc_feature 1..20: note = Synthetic Primer, R854
  source 1..20: mol_type = other RNA
ggtgctaggtgtgctcagga

SEQ ID NO: 1683 - RNA, 27 nt, synthetic construct
  misc_feature 1..27: note = Synthetic Primer, R855
  source 1..27: mol_type = other RNA
cttcactctccttcccaaatgtttatg

SEQ ID NO: 1684 - RNA, 22 nt, synthetic construct
  misc_feature 1..22: note = Synthetic Primer, R856
  source 1..22: mol_type = other RNA
ctatgattcccccactgcagtc

SEQ ID NO: 1685 - RNA, 28 nt, synthetic construct
  misc_feature 1..28: note = Synthetic Primer, R857
  source 1..28: mol_type = other RNA
agaccccaaaattacttgagccaattta

SEQ ID NO: 1686 - RNA, 27 nt, synthetic construct
  misc_feature 1..27: note = Synthetic Primer, R858
  source 1..27: mol_type = other RNA
acttcaacttcaattcatccactgaaa

SEQ ID NO: 1687 - RNA, 24 nt, synthetic construct
  misc_feature 1..24: note = Synthetic Primer, R859
  source 1..24: mol_type = other RNA
tgcttgcctgtatgaaaatatctc

SEQ ID NO: 1688 - RNA, 24 nt, synthetic construct
  misc_feature 1..24: note = Synthetic Primer, R861
  source 1..24: mol_type = other RNA
tccaatcatagccacagtttacaa

SEQ ID NO: 1689 - DNA, 26 bp, synthetic construct
  misc_feature 1..26: note = Synthetic DNA primer, R862
  modified_base 5: mod_base = OTHER; note = uracil
  modified_base 7..8: mod_base = OTHER; note = uracil
  modified_base 10..11: mod_base = OTHER; note = uracil
  modified_base 14: mod_base = OTHER; note = uracil
  modified_base 16: mod_base = OTHER; note = uracil
  modified_base 19..20: mod_base = OTHER; note = uracil
  modified_base 24: mod_base = OTHER; note = uracil
  source 1..26: mol_type = other DNA
gcactcttattcatctagttgcctgt

SEQ ID NO: 1690 - RNA, 23 nt, synthetic construct
  misc_feature 1..23: note = Synthetic Primer, R863a
  source 1..23: mol_type = other RNA
catcatgtgagccaattcctctc

SEQ ID NO: 1691 - RNA, 23 nt, synthetic construct
  misc_feature 1..23: note = Synthetic Primer, R863b
  source 1..23: mol_type = other RNA
catcatgtgagccaagtcctctc

SEQ ID NO: 1692 - DNA, 32 bp, synthetic construct
  misc_feature 1..32: note = Synthetic DNA primer, R864a
  modified_base 1..2: mod_base = OTHER; note = uracil
  modified_base 11: mod_base = OTHER; note = uracil
  modified_base 13..14: mod_base = OTHER; note = uracil
  modified_base 17: mod_base = OTHER; note = uracil
  modified_base 20..21: mod_base = OTHER; note = uracil
  modified_base 25: mod_base = OTHER; note = uracil
  modified_base 27..29: mod_base = OTHER; note = uracil
  source 1..32: mol_type = other DNA
ttgcaccaaatattggtaattaaatgtttact

SEQ ID NO: 1693 - DNA, 32 bp, synthetic construct
  misc_feature 1..32: note = Synthetic DNA primer, R864b
  modified_base 1..2: mod_base = OTHER; note = uracil
  modified_base 11: mod_base = OTHER; note = uracil
  modified_base 13..14: mod_base = OTHER; note = uracil
  modified_base 17: mod_base = OTHER; note = uracil
  modified_base 20..21: mod_base = OTHER; note = uracil
  modified_base 25: mod_base = OTHER; note = uracil
  modified_base 27..29: mod_base = OTHER; note = uracil
  source 1..32: mol_type = other DNA
ttgcaccacatattggtaattaaatgtttact

SEQ ID NO: 1694 - RNA, 22 nt, synthetic construct
  misc_feature 1..22: note = Synthetic Primer, R865
  source 1..22: mol_type = other RNA
cactgtatcgtatcccattgcg

SEQ ID NO: 1695 - RNA, 24 nt, synthetic construct
  misc_feature 1..24: note = Synthetic Primer, R867
  source 1..24: mol_type = other RNA
ttgcaagcaattgccatagaggga

SEQ ID NO: 1696 - RNA, 33 nt, synthetic construct
  misc_feature 1..33: note = Synthetic Primer, R868
  source 1..33: mol_type = other RNA
acagattaaactgtaaccaaaataaaattaggc

SEQ ID NO: 1697 - RNA, 22 nt, synthetic construct
  misc_feature 1..22: note = Synthetic Primer, R869a
  source 1..22: mol_type = other RNA
tgcctaacctatggtcataacg

SEQ ID NO: 1698 - RNA, 22 nt, synthetic construct
  misc_feature 1..22: note = Synthetic Primer, R869b
  source 1..22: mol_type = other RNA
tgcctaacctatggtcataccg

SEQ ID NO: 1699 - RNA, 20 nt, synthetic construct
  misc_feature 1..20: note = Synthetic Primer, R870
  source 1..20: mol_type = other RNA
cccaggaggtggagattgaa

SEQ ID NO: 1700 - RNA, 24 nt, synthetic construct
  misc_feature 1..24: note = Synthetic Primer, R871
  source 1..24: mol_type = other RNA
tccatgtactttgtccaatgctga

SEQ ID NO: 1701 - RNA, 25 nt, synthetic construct
  misc_feature 1..25: note = Synthetic Primer, R872
  source 1..25: mol_type = other RNA
tgtcaacacgattaacatgcaaaga

SEQ ID NO: 1702 - DNA, 26 bp, synthetic construct
  misc_feature 1..26: note = Synthetic DNA primer, R873
  modified_base 6..7: mod_base = OTHER; note = uracil
  modified_base 15: mod_base = OTHER; note = uracil
  modified_base 17: mod_base = OTHER; note = uracil
  modified_base 19: mod_base = OTHER; note = uracil
  modified_base 24: mod_base = OTHER; note = uracil
  source 1..26: mol_type = other DNA
caaaattcaaagggtatctgggctct

SEQ ID NO: 1703 - DNA, 23 bp, synthetic construct
  misc_feature 1..23: note = Synthetic DNA primer, R874
  modified_base 1: mod_base = OTHER; note = uracil
  modified_base 3: mod_base = OTHER; note = uracil
  modified_base 8: mod_base = OTHER; note = uracil
  modified_base 11: mod_base = OTHER; note = uracil
  modified_base 13..14: mod_base = OTHER; note = uracil
  modified_base 17: mod_base = OTHER; note = uracil
  modified_base 20: mod_base = OTHER; note = uracil
  modified_base 22: mod_base = OTHER; note = uracil
  source 1..23: mol_type = other DNA
tgtgcgctggtcttactcctgtt

SEQ ID NO: 1704 - RNA, 27 nt, synthetic construct
  misc_feature 1..27: note = Synthetic Primer, R875
  source 1..27: mol_type = other RNA
gccctagtggatgataagaataatcag

SEQ ID NO: 1705 - DNA, 60 bp, synthetic construct; identical to SEQ ID NO: 5
  misc_feature 1..60: note = Synthetic DNA, Rev Adaptor I
  misc_difference 21..23: note = n is a, c, g, t or u
  misc_difference 27..29: note = n is a, c, g, t or u
  modified_base 20: mod_base = OTHER; note = uracil
  modified_base 33: mod_base = OTHER; note = uracil
  modified_base 43: mod_base = OTHER; note = uracil
  modified_base 58: mod_base = OTHER; note = uracil
  source 1..60: mol_type = other DNA

SEQ ID NO: 1706 - DNA, 90 bp, synthetic construct
  misc_feature 1..90: note = Synthetic Primer, 5-01-Ah
  source 1..90: mol_type = other DNA
aatgatacggcgaccaccgagatctacacagcgctagtcgtcggcagcgtcagatgtgtataagagacagtctgtacggtgacaaggcgt

SEQ ID NO: 1707 - DNA, 90 bp, synthetic construct
  misc_feature 1..90: note = Synthetic Primer, 5-02-Ah
  source 1..90: mol_type = other DNA
aatgatacggcgaccaccgagatctacacgatatcgatcgtcggcagcgtcagatgtgtataagagacagtctgtacggtgacaaggcgt

SEQ ID NO: 1708 - DNA, 90 bp, synthetic construct
  misc_feature 1..90: note = Synthetic Primer, 5-07-Ah
  source 1..90: mol_type = other DNA
aatgatacggcgaccaccgagatctacacacatagcgtcgtcggcagcgtcagatgtgtataagagacagtctgtacggtgacaaggcgt

SEQ ID NO: 1709 - DNA, 90 bp, synthetic construct
  misc_feature 1..90: note = Synthetic Primer, 5-08-Ah
  source 1..90: mol_type = other DNA
aatgatacggcgaccaccgagatctacacgtgcgatatcgtcggcagcgtcagatgtgtataagagacagtctgtacggtgacaaggcgt

SEQ ID NO: 1710 - DNA, 90 bp, synthetic construct
  misc_feature 1..90: note = Synthetic Primer, 5-09-Ah
  source 1..90: mol_type = other DNA
aatgatacggcgaccaccgagatctacacccaacagatcgtcggcagcgtcagatgtgtataagagacagtctgtacggtgacaaggcgt

SEQ ID NO: 1711 - DNA, 90 bp, synthetic construct
  misc_feature 1..90: note = Synthetic Primer, 5-010-Ah
  source 1..90: mol_type = other DNA
aatgatacggcgaccaccgagatctacacttggtgagtcgtcggcagcgtcagatgtgtataagagacagtctgtacggtgacaaggcgt

SEQ ID NO: 1712 - DNA, 90 bp, synthetic construct
  misc_feature 1..90: note = Synthetic Primer, 5-013-Ah
  source 1..90: mol_type = other DNA
aatgatacggcgaccaccgagatctacacaaccgcggtcgtcggcagcgtcagatgtgtataagagacagtctgtacggtgacaaggcgt

SEQ ID NO: 1713 - DNA, 90 bp, synthetic construct
  misc_feature 1..90: note = Synthetic Primer, 5-014-Ah
  source 1..90: mol_type = other DNA
aatgatacggcgaccaccgagatctacacggttataatcgtcggcagcgtcagatgtgtataagagacagtctgtacggtgacaaggcgt

SEQ ID NO: 1714 - DNA, 90 bp, synthetic construct
  misc_feature 1..90: note = Synthetic Primer, 01-Ih
  source 1..90: mol_type = other DNA
aatgatacggcgaccaccgagatctacacagcgctagtcgtcggcagcgtcagatgtgtataagagacagtgacaaggcgtagtcacggt

SEQ ID NO: 1715 - DNA, 90 bp, synthetic construct
  misc_feature 1..90: note = Synthetic Primer, 02-Ih
  source 1..90: mol_type = other DNA
aatgatacggcgaccaccgagatctacacgatatcgatcgtcggcagcgtcagatgtgtataagagacagtgacaaggcgtagtcacggt

SEQ ID NO: 1716 - DNA, 90 bp, synthetic construct
  misc_feature 1..90: note = Synthetic Primer, 5-07-Ih
  source 1..90: mol_type = other DNA
aatgatacggcgaccaccgagatctacacacatagcgtcgtcggcagcgtcagatgtgtataagagacagtgacaaggcgtagtcacggt

SEQ ID NO: 1717 - DNA, 90 bp, synthetic construct
  misc_feature 1..90: note = Synthetic Primer, 5-08-Ih
  source 1..90: mol_type = other DNA
aatgatacggcgaccaccgagatctacacgtgcgatatcgtcggcagcgtcagatgtgtataagagacagtgacaaggcgtagtcacggt

SEQ ID NO: 1718 - DNA, 90 bp, synthetic construct
  misc_feature 1..90: note = Synthetic Primer, 5-09-Ih
  source 1..90: mol_type = other DNA
aatgatacggcgaccaccgagatctacacccaacagatcgtcggcagcgtcagatgtgtataagagacagtgacaaggcgtagtcacggt

SEQ ID NO: 1719 - DNA, 90 bp, synthetic construct
  misc_feature 1..90: note = Synthetic Primer, 5-010-Ih
  source 1..90: mol_type = other DNA
aatgatacggcgaccaccgagatctacacttggtgagtcgtcggcagcgtcagatgtgtataagagacagtgacaaggcgtagtcacggt

SEQ ID NO: 1720 - DNA, 90 bp, synthetic construct
  misc_feature 1..90: note = Synthetic Primer, 5-013-Ih
  source 1..90: mol_type = other DNA
aatgatacggcgaccaccgagatctacacaaccgcggtcgtcggcagcgtcagatgtgtataagagacagtgacaaggcgtagtcacggt

SEQ ID NO: 1721 - DNA, 90 bp, synthetic construct
  misc_feature 1..90: note = Synthetic Primer, 5-014-Ih
  source 1..90: mol_type = other DNA
aatgatacggcgaccaccgagatctacacggttataatcgtcggcagcgtcagatgtgtataagagacagtgacaaggcgtagtcacggt

SEQ ID NO: 1722 - DNA, 86 bp, synthetic construct
  misc_feature 1..86: note = Synthetic Primer, 7-1-Ah
  source 1..86: mol_type = other DNA
caagcagaagacggcatacgagatatattcacgtctcgtgggctcggagatgtgtataagagacagtctgtacggtgacaaggcgt

SEQ ID NO: 1723 - DNA, 86 bp, synthetic construct
  misc_feature 1..86: note = Synthetic Primer, 7-2-Ah
  source 1..86: mol_type = other DNA
caagcagaagacggcatacgagatgcgcctgtgtctcgtgggctcggagatgtgtataagagacagtctgtacggtgacaaggcgt

SEQ ID NO: 1724 - DNA, 86 bp, synthetic construct
  misc_feature 1..86: note = Synthetic Primer, 7-3-Ah
  source 1..86: mol_type = other DNA
caagcagaagacggcatacgagatactctatggtctcgtgggctcggagatgtgtataagagacagtctgtacggtgacaaggcgt

SEQ ID NO: 1725 - DNA, 86 bp, synthetic construct
  misc_feature 1..86: note = Synthetic Primer, 7-4-Ah
  source 1..86: mol_type = other DNA
caagcagaagacggcatacgagatgtctcgcagtctcgtgggctcggagatgtgtataagagacagtctgtacggtgacaaggcgt

SEQ ID NO: 1726 - DNA, 86 bp, synthetic construct
  misc_feature 1..86: note = Synthetic Primer, 7-5-Ah
  source 1..86: mol_type = other DNA
caagcagaagacggcatacgagatagtagagagtctcgtgggctcggagatgtgtataagagacagtctgtacggtgacaaggcgt

SEQ ID NO: 1727 - DNA, 86 bp, synthetic construct
  misc_feature 1..86: note = Synthetic Primer, 7-6-Ah
  source 1..86: mol_type = other DNA
caagcagaagacggcatacgagatgacgagaggtctcgtgggctcggagatgtgtataagagacagtctgtacggtgacaaggcgt

SEQ ID NO: 1728 - DNA, 86 bp, synthetic construct
  misc_feature 1..86: note = Synthetic Primer, 7-7-Ah
  source 1..86: mol_type = other DNA
caagcagaagacggcatacgagatagacttgggtctcgtgggctcggagatgtgtataagagacagtctgtacggtgacaaggcgt

SEQ ID NO: 1729 - DNA, 86 bp, synthetic construct
  misc_feature 1..86: note = Synthetic Primer, 7-8-Ah
  source 1..86: mol_type = other DNA
caagcagaagacggcatacgagatgagtccaagtctcgtgggctcggagatgtgtataagagacagtctgtacggtgacaaggcgt

SEQ ID NO: 1730 - DNA, 86 bp, synthetic construct
  misc_feature 1..86: note = Synthetic Primer, 7-9-Ah
  source 1..86: mol_type = other DNA
caagcagaagacggcatacgagataattctgcgtctcgtgggctcggagatgtgtataagagacagtctgtacggtgacaaggcgt

SEQ ID NO: 1731 - DNA, 86 bp, synthetic construct
  misc_feature 1..86: note = Synthetic Primer, 7-10-Ah
  source 1..86: mol_type = other DNA
caagcagaagacggcatacgagatggcctcatgtctcgtgggctcggagatgtgtataagagacagtctgtacggtgacaaggcgt

SEQ ID NO: 1732 - DNA, 86 bp, synthetic construct
  misc_feature 1..86: note = Synthetic Primer, 7-1-Ah
  source 1..86: mol_type = other DNA
caagcagaagacggcatacgagatatcttagtgtctcgtgggctcggagatgtgtataagagacagtctgtacggtgacaaggcgt

SEQ ID NO: 1733 - DNA, 86 bp, synthetic construct
  misc_feature 1..86: note = Synthetic Primer, 7-12-Ah
  source 1..86: mol_type = other DNA
caagcagaagacggcatacgagatgctccgacgtctcgtgggctcggagatgtgtataagagacagtctgtacggtgacaaggcgt

SEQ ID NO: 1734 - DNA, 86 bp, synthetic construct
  misc_feature 1..86: note = Synthetic Primer, 7-1-Ih
  source 1..86: mol_type = other DNA
caagcagaagacggcatacgagatatattcacgtctcgtgggctcggagatgtgtataagagacagtgacaaggcgtagtcacggt

SEQ ID NO: 1735 - DNA, 86 bp, synthetic construct
  misc_feature 1..86: note = Synthetic Primer, 7-2-Ih
  source 1..86: mol_type = other DNA
caagcagaagacggcatacgagatgcgcctgtgtctcgtgggctcggagatgtgtataagagacagtgacaaggcgtagtcacggt

SEQ ID NO: 1736 - DNA, 86 bp, synthetic construct
  misc_feature 1..86: note = Synthetic Primer, 7-3-Ih
  source 1..86: mol_type = other DNA
caagcagaagacggcatacgagatactctatggtctcgtgggctcggagatgtgtataagagacagtgacaaggcgtagtcacggt

SEQ ID NO: 1737 - DNA, 86 bp, synthetic construct
  misc_feature 1..86: note = Synthetic Primer, 7-4-Ih
  source 1..86: mol_type = other DNA
caagcagaagacggcatacgagatgtctcgcagtctcgtgggctcggagatgtgtataagagacagtgacaaggcgtagtcacggt

SEQ ID NO: 1738 - DNA, 86 bp, synthetic construct
  misc_feature 1..86: note = Synthetic Primer, 7-5-Ih
  source 1..86: mol_type = other DNA
caagcagaagacggcatacgagatagtagagagtctcgtgggctcggagatgtgtataagagacagtgacaaggcgtagtcacggt

SEQ ID NO: 1739 - DNA, 86 bp, synthetic construct
  misc_feature 1..86: note = Synthetic Primer, 7-6-Ih
  source 1..86: mol_type = other DNA
caagcagaagacggcatacgagatgacgagaggtctcgtgggctcggagatgtgtataagagacagtgacaaggcgtagtcacggt

SEQ ID NO: 1740 - DNA, 86 bp, synthetic construct
  misc_feature 1..86: note = Synthetic Primer, 7-7-Ih
  source 1..86: mol_type = other DNA
caagcagaagacggcatacgagatagacttgggtctcgtgggctcggagatgtgtataagagacagtgacaaggcgtagtcacggt

SEQ ID NO: 1741 - DNA, 86 bp, synthetic construct
  misc_feature 1..86: note = Synthetic Primer, 7-8-Ih
  source 1..86: mol_type = other DNA
caagcagaagacggcatacgagatgagtccaagtctcgtgggctcggagatgtgtataagagacagtgacaaggcgtagtcacggt

SEQ ID NO: 1742 - DNA, 86 bp, synthetic construct
  misc_feature 1..86: note = Synthetic Primer, 7-9-Ih
  source 1..86: mol_type = other DNA
caagcagaagacggcatacgagataattctgcgtctcgtgggctcggagatgtgtataagagacagtgacaaggcgtagtcacggt

SEQ ID NO: 1743 - DNA, 86 bp, synthetic construct
  misc_feature 1..86: note = Synthetic Primer, 7-10-Ih
  source 1..86: mol_type = other DNA
caagcagaagacggcatacgagatggcctcatgtctcgtgggctcggagatgtgtataagagacagtgacaaggcgtagtcacggt

SEQ ID NO: 1744 - DNA, 86 bp, synthetic construct
  misc_feature 1..86: note = Synthetic Primer, 7-11-Ih
  source 1..86: mol_type = other DNA
caagcagaagacggcatacgagatatcttagtgtctcgtgggctcggagatgtgtataagagacagtgacaaggcgtagtcacggt

SEQ ID NO: 1745 - DNA, 86 bp, synthetic construct
  misc_feature 1..86: note = Synthetic Primer, 7-12-Ih
  source 1..86: mol_type = other DNA
caagcagaagacggcatacgagatgctccgacgtctcgtgggctcggagatgtgtataagagacagtgacaaggcgtagtcacggt

SEQ ID NO: 1746 - RNA, 18 nt, synthetic construct
  misc_feature 1..18: note = Synthetic Primer, F498
  source 1..18: mol_type = other RNA
gagtgtgcgtggctctca

SEQ ID NO: 1747 - RNA, 18 nt, synthetic construct
  misc_feature 1..18: note = Synthetic Primer, F825
  source 1..18: mol_type = other RNA
ctggctccgggtgacagc

SEQ ID NO: 1748 - RNA, 19 nt, synthetic construct
  misc_feature 1..19: note = Synthetic Primer, F826
  source 1..19: mol_type = other RNA
gactcccatgacccccatc

SEQ ID NO: 1749 - RNA, 28 nt, synthetic construct
  misc_feature 1..28: note = Synthetic Primer, F827
  source 1..28: mol_type = other RNA
aaaaatgttatgtcagcgtttggcttaa

SEQ ID NO: 1750 - RNA, 18 nt, synthetic construct
  misc_feature 1..18: note = Synthetic Primer, F828
  source 1..18: mol_type = other RNA
gtaggcgcgagctaagca

SEQ ID NO: 1751 - RNA, 28 nt, synthetic construct
  misc_feature 1..28: note = Synthetic Primer, F829
  source 1..28: mol_type = other RNA
caggtcatattgaacattccagatacct

SEQ ID NO: 1752 - RNA, 18 nt, synthetic construct
  misc_feature 1..18: note = Synthetic Primer, F830
  source 1..18: mol_type = other RNA
ggtcctgacgcaggcttc

SEQ ID NO: 1753 - RNA, 22 nt, synthetic construct
  misc_feature 1..22: note = Synthetic Primer, F831
  source 1..22: mol_type = other RNA
gtacctgcatcaacccctctaa

SEQ ID NO: 1754 - RNA, 20 nt, synthetic construct
  misc_feature 1..20: note = Synthetic Primer, F832
  source 1..20: mol_type = other RNA
cagagacccgtgctgagttt

SEQ ID NO: 1755 - RNA, 23 nt, synthetic construct
  misc_feature 1..23: note = Synthetic Primer, F833
  source 1..23: mol_type = other RNA
ggagagaagagtgcacaatacca

SEQ ID NO: 1756 - RNA, 23 nt, synthetic construct
  misc_feature 1..23: note = Synthetic Primer, F834
  source 1..23: mol_type = other RNA
cctgtaatccctgcactttagga

SEQ ID NO: 1757 - RNA, 25 nt, synthetic construct
  misc_feature 1..25: note = Synthetic Primer, F835
  source 1..25: mol_type = other RNA
actttccagttgagcatcccaaatt

SEQ ID NO: 1758 - RNA, 28 nt, synthetic construct
  misc_feature 1..28: note = Synthetic Primer, F836
  source 1..28: mol_type = other RNA
cgtcagcgtgatatgtaccgtattttat

SEQ ID NO: 1759 - RNA, 27 nt, synthetic construct
  misc_feature 1..27: note = Synthetic Primer, F837
  source 1..27: mol_type = other RNA
cacctcagtaatatggaagtccaagtt

SEQ ID NO: 1760 - RNA, 26 nt, synthetic construct
  misc_feature 1..26: note = Synthetic Primer, F797
  source 1..26: mol_type = other RNA
cccttcgtagacatatagctgttctc

SEQ ID NO: 1761 - RNA, 23 nt, synthetic construct
  misc_feature 1..23: note = Synthetic Primer, F798
  source 1..23: mol_type = other RNA
tggtgctagttgcaaagacacaa

SEQ ID NO: 1762 - RNA, 18 nt, synthetic construct
  misc_feature 1..18: note = Synthetic Primer, F799
  source 1..18: mol_type = other RNA
agcgacgccattgctcat

SEQ ID NO: 1763 - RNA, 21 nt, synthetic construct
  misc_feature 1..21: note = Synthetic Primer, F800
  source 1..21: mol_type = other RNA
cctcaaccatttccggcaaat

SEQ ID NO: 1764 - RNA, 18 nt, synthetic construct
  misc_feature 1..18: note = Synthetic Primer, F801
  source 1..18: mol_type = other RNA
ccagctccctgcgaagag

SEQ ID NO: 1765 - RNA, 26 nt, synthetic construct
  misc_feature 1..26: note = Synthetic Primer, F802
  source 1..26: mol_type = other RNA
aatccctgcagtagatacgaagacta

SEQ ID NO: 1766 - RNA, 25 nt, synthetic construct
  misc_feature 1..25: note = Synthetic Primer, F803
  source 1..25: mol_type = other RNA
agaccttgcagaaataggaattgct

SEQ ID NO: 1767 - RNA, 27 nt, synthetic construct
  misc_feature 1..27: note = Synthetic Primer, F805
  source 1..27: mol_type = other RNA
aaagaaaagacagttggaggaatctgt

SEQ ID NO: 1768 - RNA, 28 nt, synthetic construct
  misc_feature 1..28: note = Synthetic Primer, F806
  source 1..28: mol_type = other RNA
gaagaaaatgaaaaggagttagcagcat

SEQ ID NO: 1769 - RNA, 27 nt, synthetic construct
  misc_feature 1..27: note = Synthetic Primer, F807
  source 1..27: mol_type = other RNA
agtggcaaaagaacttcagactttaca

SEQ ID NO: 1770 - RNA, 19 nt, synthetic construct
  misc_feature 1..19: note = Synthetic Primer, F808
  source 1..19: mol_type = other RNA
gcgctgctcagaagcaaaa

SEQ ID NO: 1771 - RNA, 25 nt, synthetic construct
  misc_feature 1..25: note = Synthetic Primer, F809
  source 1..25: mol_type = other RNA
gtagatcgcataaaggaagcagtca

SEQ ID NO: 1772 - RNA, 26 nt, synthetic construct
  misc_feature 1..26: note = Synthetic Primer, F810
  source 1..26: mol_type = other RNA
ggaagcagtcaggtcaaagaatatgg

SEQ ID NO: 1773 - RNA, 27 nt, synthetic construct
  misc_feature 1..27: note = Synthetic Primer, F812
  source 1..27: mol_type = other RNA
caagcagaaacactgtacaaagagatt

SEQ ID NO: 1774 - RNA, 18 nt, synthetic construct
  misc_feature 1..18: note = Synthetic Primer, F813
  source 1..18: mol_type = other RNA
gagggcgagctgcatgat

SEQ ID NO: 1775 - RNA, 25 nt, synthetic construct
  misc_feature 1..25: note = Synthetic Primer, F814
  source 1..25: mol_type = other RNA
cacatcttcaggtgctggatttttc

SEQ ID NO: 1776 - RNA, 27 nt, synthetic construct
  misc_feature 1..27: note = Synthetic Primer, F815
  source 1..27: mol_type = other RNA
cttttgaaaagccagtgatgatctcaa

SEQ ID NO: 1777 - RNA, 24 nt, synthetic construct
  misc_feature 1..24: note = Synthetic Primer, F816
  source 1..24: mol_type = other RNA
gcaccttgactttaagtgagagca

SEQ ID NO: 1778 - RNA, 28 nt, synthetic construct
  misc_feature 1..28: note = Synthetic Primer, F817
  source 1..28: mol_type = other RNA
acagcactgttattactacttgggtttt

SEQ ID NO: 1779 - RNA, 22 nt, synthetic construct
  misc_feature 1..22: note = Synthetic Primer, F818
  source 1..22: mol_type = other RNA
caagctccttacatacccagca

SEQ ID NO: 1780 - RNA, 19 nt, synthetic construct
  misc_feature 1..19: note = Synthetic Primer, F819
  source 1..19: mol_type = other RNA
gcgtttcctcgcttgcatt

SEQ ID NO: 1781 - DNA, 22 bp, synthetic construct
  misc_feature 1..22: note = Synthetic Primer, F820
  source 1..22: mol_type = other DNA
cgggcaggaatctgatgacttt

SEQ ID NO: 1782 - RNA, 20 nt, synthetic construct
  misc_feature 1..20: note = Synthetic Primer, F821
  source 1..20: mol_type = other RNA
gcagggcagcaacatctttg

SEQ ID NO: 1783 - RNA, 27 nt, synthetic construct
  misc_feature 1..27: note = Synthetic Primer, F822
  source 1..27: mol_type = other RNA
ggctcctgagacctttgataacataac

SEQ ID NO: 1784 - RNA, 26 nt, synthetic construct
  misc_feature 1..26: note = Synthetic Primer, F823
  source 1..26: mol_type = other RNA
cgtgtgctccctggatattcttagta

SEQ ID NO: 1785 - RNA, 18 nt, synthetic construct
  misc_feature 1..18: note = Synthetic Primer, F824
  source 1..18: mol_type = other RNA
ctggctccgggtgacagc

1. A method for preparing a library of target nucleic acid sequences comprising
(a) contacting a nucleic acid sample with a plurality of adaptors capable of amplification of one or more target nucleic acid sequences in the sample under conditions wherein the target nucleic acid(s) undergo a first amplification;
(b) digesting resulting first amplification products to reduce or eliminate resulting primer dimers and prepare partially digested target amplicons, producing gapped, double stranded amplicons, then repairing the partially digested target amplicons; and
(c) amplifying the repaired target amplicons in a second amplification using universal primers, thereby producing a library of target nucleic acid sequences;
wherein each of the plurality of adaptors comprises a universal handle sequence and a target nucleic acid sequence and a cleavable moiety and optionally one or more tag sequences; and wherein at least two and up to one hundred thousand target specific adaptor pairs are included; and
wherein the target nucleic acid sequence of the adaptor includes at least one cleavable moiety and the universal handle sequence does not include the cleavable moiety.

2. The method of claim 1 wherein an optional tag sequence is included in at least one adaptor, and the cleavable moieties are included in the adaptor sequence flanking either end of the tag sequence.

3. The method of claim 1 carried out in a single, addition only workflow reaction, allowing for rapid production of highly multiplexed targeted libraries.

4. The method of claim 2 wherein all of the adaptors comprise tag sequences having cleavable groups flanking either end of the tag sequences.

5. The method of claim 1 wherein the digestion and repair of step (b) is carried out in a single step or is carried out in a temporally separate manner at different temperatures.

6. The method of claim 1 wherein one or more of the method steps is conducted in manual mode or in an automated mode or a combination thereof.

7. The method of claim 1 further comprising at least one purification step.

8. The method of claim 7 wherein a purification step is carried out only after step (c) or wherein a first purification step is carried out after step (b) and a second purification step is carried out after step (c).

9. The method of claim 2 wherein each target specific pair of the plurality of adaptors includes up to 16,777,216 different adaptor combinations comprising different tag sequences.

10. The method of claim 1, further comprising analyzing the sequence of the resulting library of target nucleic acid sequences.

11. The method of claim 10 wherein analyzing comprises sequencing by traditional sequencing reactions, high throughput next generation sequencing, targeted multiplex array sequence detection, or any combination of two or more of the foregoing.

12. The method of claim 10 further comprising determining the abundance of at least one of the target nucleic acid sequences in the sample.

13. The method of claim 11 wherein sequencing is carried out in a bidirectional manner, thereby generating sequence reads in both forward and reverse strands for any given amplicon.

14. The method of claim 1, wherein a digestion reagent comprises any one or a combination of uracil DNA glycosylase (UDG), apurinic endonuclease (e.g., APE1), RecJf, formamidopyrimidine [fapy]-DNA glycosylase (fpg), Nth endonuclease III, endonuclease VIII, polynucleotide kinase (PNK), Taq DNA polymerase, DNA polymerase I and/or human DNA polymerase beta.

15. The method of claim 1 wherein the repair reagent comprises any one or a combination of Phusion DNA polymerase, Phusion U DNA polymerase, SuperFi DNA polymerase, Taq DNA polymerase, Human DNA polymerase beta, T4 DNA polymerase and/or T7 DNA polymerase, SuperFiU DNA polymerase, E. coli DNA ligase, T3 DNA ligase, T4 DNA ligase, T7 DNA ligase, Taq DNA ligase, and/or 9° N DNA ligase.

16. The method of claim 5, wherein the plurality of gapped polynucleotide products in step (b) are contacted with the digestion and repair reagents simultaneously, or the plurality of gapped polynucleotide products in step (b) are contacted sequentially with the digestion and repair reagents.

17. A composition comprising a nucleic acid library generated by step (a) of claim 1.

18. A method for preparing a library of target nucleic acid sequences comprising
(a) contacting a nucleic acid sample with a plurality of adaptors capable of amplification of one or more target nucleic acid sequences in the sample under conditions wherein the target nucleic acid(s) undergo a first amplification;
(b) digesting resulting first amplification products to reduce or eliminate resulting primer dimers and prepare partially digested target amplicons, producing gapped, double stranded amplicons, then repairing the partially digested target amplicons; and
(c) amplifying the repaired target amplicons in a second amplification using universal primers, thereby producing a library of target nucleic acid sequences;
wherein each of the plurality of adaptors comprise a universal handle sequence, one or more tag sequences, a target nucleic acid sequence and a cleavable moiety; and wherein at least two and up to one hundred thousand target specific adaptor pairs are included;
wherein the target nucleic acid sequence of the adaptor includes at least one cleavable moiety, cleavable moieties are included in the flanking either end of the tag sequence and the universal handle sequence does not include the cleavable moiety.

19. The method of claim 1, wherein the second amplification utilizes at least two primer pairs to incorporate two universal sequences on each end of the target amplicons to enable downstream bi-directional sequencing.

20. The method of claim 18, wherein the second amplification utilizes at least two primer pairs to incorporate two universal sequences on each end of the target amplicons to enable downstream bi-directional sequencing.
